(19) United States
(12) Patent Application Publication
(10) Pub. No.: US 2025/0011741 A1
(43) Pub. Date: Jan. 9, 2025

(54) OMNI 263, 264, 266, 268, 269, 271, 274, 275, 276, 278, 279, 280, 281, 283, 284, 286, 287, 288, 290, 291, 293, 294, 295, 296, 297, 298, 299, 300, 301, 302, 303, 304, 305, 307, 308, 309, 310, 311, 312, 313, 314, 315, 316, 317, 318, 319, 320, 321, 322, 323, 324, 325, 326, 327, 329, 330, 331, 332, 333, 334, 336, 337, 338, 339, 340, 341, 342, 343, 344, 345, 346, 347, 348, 349, 350, 351, 352, 353, 354, 356, 357, 358, 359, 360, 361, 362, 363, 364, 365, 366, 367, 368, 369, 370, 371, 372, 373, 375, 376,

(71) Applicant: EMENDOBIO INC, Wilmington, DE (US)

(72) Inventors: Lior IZHAR, Tel Aviv (IL); Nadav MARDACH BAR, Rehovot (IL); Liat ROCKAH, Rishon LeZion (IL); Nir HECHT, Tel Aviv (IL); Sigal COHEN, Rehovot (IL); Nurit MERON, Ramat Gan (IL); Ophir ADIV, Rehovot (IL); Ariel GISPAN, Kfar Adumim (IL); Idit BUCH, Hod-Hasharon (IL)

(73) Assignee: EMENDOBIO INC, Wilmington, DE (US)

(21) Appl. No.: 18/711,632

(22) PCT Filed: Nov. 17, 2022
(86) PCT No.: PCT/US2022/080014

§ 371 Date: May 20, 2024

Related U.S. Application Data
(60) Provisional application No. 63/281,390, filed on Nov. 19, 2021.

(51) Int. Cl. C12N 9/22; C12N 15/11; C12N 15/90

(52) U.S. Cl. CPC C12N 9/22; C12N 15/11; C12N 15/907; C12N 2310/20; C12N 2800/80

(57) ABSTRACT

The present invention provides a non-naturally occurring composition comprising a CRISPR nuclease comprising a sequence having at least 95% identity to the amino acid sequence selected from the group consisting of SEQ ID NOs: 1-108 or a nucleic acid molecule comprising a sequence encoding the CRISPR nuclease.

[0001] This application claims the benefit of U.S. Provisional Application No. 63/281,390, filed Nov. 19, 2021, the contents of which are hereby incorporated by reference.

[0002] Throughout this application, various publications are referenced, including referenced in parenthesis. The disclosures of all publications mentioned in this application in their entireties are hereby incorporated by reference into this application in order to provide additional description of the art to which this invention pertains and of the features in the art which can be employed with this invention.

### REFERENCE TO SEQUENCE LISTING

[0003] This application incorporates-by-reference nucleotide sequences which are present in the file named “221117_91815-A-PCT_Sequence_Listing_AWG.xml”, which is 4,464 kilobytes in size, and which was created on Nov. 15, 2022 in the IBM-PC machine format, having an operating system compatibility with MS-Windows, which is contained in the XML file filed Nov. 17, 2022 as part of this application.

### FIELD OF THE INVENTION

[0004] The present invention is directed to, inter alia, composition and methods for genome editing.

### BACKGROUND OF THE INVENTION

[0005] The Clustered Regularly Interspaced Short Palindromic Repeat (CRISPR) systems of bacterial and archaeal adaptive immunity show extreme diversity of protein composition and genomic loci architecture. The CRISPR systems have become important tools for research and genome engineering. Nevertheless, many details of CRISPR systems have not been determined and the applicability of CRISPR nucleases may be limited by sequence specificity requirements, expression, or delivery challenges. Different CRISPR nucleases have diverse characteristics such as: size, PAM site, on target activity, specificity, cleavage pattern (e.g. blunt, staggered ends), and prominent pattern of indel formation following cleavage. Different sets of characteristics may be useful for different applications. For example, some CRISPR nucleases may be able to target particular genomic loci that other CRISPR nucleases cannot due to limitations of the PAM site. In addition, some CRISPR nucleases currently in use exhibit pre-immunity, which may limit in vivo applicability. See Charlesworth et al., Nature Medicine (2019) and Wagner et al., Nature Medicine (2019). Accordingly, discovery, engineering, and improvement of novel CRISPR nucleases is of importance.

### SUMMARY OF THE INVENTION

[0006] Disclosed herein are compositions and methods that may be utilized for genomic engineering, epigenomic engineering, genome targeting, genome editing of cells, and/or in vitro diagnostics.

[0007] The disclosed compositions may be utilized for modifying genomic DNA sequences. As used herein, genomic DNA refers to linear and/or chromosomal DNA and/or plasmid or other extrachromosomal DNA sequences present in the cell or cells of interest. In some embodiments, the cell of interest is a eukaryotic cell. In some embodiments, the cell of interest is a prokaryotic cell. In some embodiments, the methods produce double-stranded breaks (DSBs) at pre-determined target sites in a genomic DNA sequence, resulting in mutation, insertion, and/or deletion of a DNA sequence at the target site(s) in a genome.

[0008] Accordingly, in some embodiments, the compositions comprise a Clustered Regularly Interspaced Short Palindromic Repeat (CRISPR) nucleases. In some embodiments, the CRISPR nuclease is a CRISPR-associated protein.

### OMNI Crispr Nucleases

[0009] Embodiments of the present invention provide for CRISPR nucleases designated as an “OMNI” nuclease as provided in Table 1.

[0010] This invention provides a method of modifying a nucleotide sequence at a target site in the genome of a mammalian cell comprising introducing into the cell (i) a composition comprising a CRISPR nuclease having at least 95% identity to an amino acid sequence selected from the group consisting of SEQ ID NOs: 1-108 or a nucleic acid molecule comprising a sequence encoding a CRISPR nuclease which sequence has at least 95% identity to a nucleic acid sequence selected from the group consisting of SEQ ID NOs: 109-324 and (ii) a DNA-targeting RNA molecule, or a DNA polynucleotide encoding a DNA-targeting RNA molecule, comprising a nucleotide sequence that is complementary to a sequence in the target DNA.

[0011] This invention also provides a non-naturally occurring composition comprising a CRISPR associated system comprising:
[0012] a) one or more RNA molecules comprising a guide sequence portion linked to a direct repeat sequence, wherein the guide sequence is capable of hybridizing with a target sequence, or one or more nucleotide sequences encoding the one or more RNA molecules; and
[0013] b) an CRISPR nuclease comprising an amino acid sequence having at least 95% identity to the amino acid sequence selected from the group consisting of SEQ ID NOs: 1-108 or a nucleic acid molecule comprising a sequence encoding the CRISPR nuclease; and wherein the one or more RNA molecules hybridize to the target sequence, wherein the target sequence is adjacent to the 3′ end of a complimentary sequence of a Protospacer Adjacent Motif (PAM), and the one or more RNA molecules form a complex with the RNA-guided nuclease.

[0014] This invention also provides a non-naturally occurring composition comprising:
[0015] a) a CRISPR nuclease comprising a sequence having at least 95% identity to the amino acid sequence selected from the group consisting of SEQ ID NOs: 1-108 or a nucleic acid molecule comprising a sequence encoding the CRISPR nuclease; and
[0016] b) one or more RNA molecules, or one or more DNA polynucleotide encoding the one or more RNA molecules, comprising at least one of:
   [0017] i) a nuclease-binding RNA nucleotide sequence capable of interacting with/binding to the CRISPR nuclease; and
   [0018] ii) a DNA-targeting RNA nucleotide sequence comprising a sequence complementary to a sequence in a target DNA sequence,
[0019] wherein the CRISPR nuclease is capable of complexing with the one or more RNA molecules to form a complex capable of hybridizing with the target DNA sequence.

### BRIEF DESCRIPTION OF THE DRAWINGS

[0020] FIGS. 1A-C: The predicted secondary structure of a single guide RNA (sgRNA) (crRNA-tracrRNA) from sgRNA-279, sgRNA-281 and sgRNA-280. FIG. 1A: A representation of a crRNA-tracrRNA duplex for OMNI-279, the crRNA and tracrRNA portions of the sgRNA are noted. FIG. 1B: Examples of V1 and V2 of sgRNA design for OMNI-281. FIG. 1C: Examples of V1 of sgRNA design for OMNI-280 (sgRNA listed in Table 2)

[0021] FIGS. 2-109: In vitro TXTL PAM depletion results for OMNI nucleases. The PAM logo is a schematic representation of the ratio of the depleted site (top panel). Depletion ratio (bottom panel, left) of specific PAM sequences (bottom panel, right) from the PAM plasmid library were calculated following NGS of the TXTL reaction. The calculation for each OMNI is based on a 4N window along the 8 bp sequence of the PAM library. The required PAM of the tested OMNI and the level of nuclease activity under the reaction conditions is inferred from the depletion ratio. In vitro PAM depletion results for: FIG. 2: OMNI-263. FIG. 3: OMNI-264. FIG. 4: OMNI-266. FIG. 5: OMNI-268. FIG. 6: OMNI-269. FIG. 7: OMNI-271. FIG. 8: OMNI-274. FIG. 9: OMNI-275. FIG. 10: OMNI-276. FIG. 11: OMNI-278. FIG. 12: OMNI-279. FIG. 13: OMNI-280. FIG. 14: OMNI-281. FIG. 15: OMNI-283. FIG. 16: OMNI-284. FIG. 17: OMNI-286. FIG. 18: OMNI-287. FIG. 19: OMNI-288. FIG. 20: OMNI-290. FIG. 21: OMNI-291. FIG. 22: OMNI-293. FIG. 23: OMNI-294. FIG. 24: OMNI-295. FIG. 25: OMNI-296. FIG. 26: OMNI-297. FIG. 27: OMNI-298. FIG. 28: OMNI-299. FIG. 29: OMNI-300. FIG. 30: OMNI-301. FIG. 31: OMNI-302. FIG. 32: OMNI-303. FIG. 33: OMNI-304. FIG. 34: OMNI-305. FIG. 35: OMNI-307. FIG. 36: OMNI-308. FIG. 37: OMNI-309. FIG. 38: OMNI-310. FIG. 39: OMNI-311. FIG. 40: OMNI-312. FIG. 41: OMNI-313. FIG. 42: OMNI-314. FIG. 43: OMNI-315. FIG. 44: OMNI-316. FIG. 45: OMNI-317. FIG. 46: OMNI-318. FIG. 47: OMNI-319. FIG. 48: OMNI-320. FIG. 49: OMNI-321. FIG. 50: OMNI-322. FIG. 51: OMNI-323. FIG. 52: OMNI-324. FIG. 53: OMNI-325. FIG. 54: OMNI-326. FIG. 55: OMNI-327. FIG. 56: OMNI-329. FIG. 57: OMNI-330. FIG. 58: OMNI-331. FIG. 59: OMNI-332. FIG. 60: OMNI-333. FIG. 61: OMNI-334. FIG. 62: OMNI-336. FIG. 63: OMNI-337. FIG. 64: OMNI-338. FIG. 65: OMNI-339. FIG. 66: OMNI-340. FIG. 67: OMNI-341. FIG. 68: OMNI-342. FIG. 69: OMNI-343. FIG. 70: OMNI-344. FIG. 71: OMNI-345. FIG. 72: OMNI-346. FIG. 73: OMNI-347. FIG. 74: OMNI-348. FIG. 75: OMNI-349. FIG. 76: OMNI-350. FIG. 77: OMNI-351. FIG. 78: OMNI-352. FIG. 79: OMNI-353. FIG. 80: OMNI-354. FIG. 81: OMNI-356. FIG. 82: OMNI-357. FIG. 83: OMNI-358. FIG. 84: OMNI-359. FIG. 85: OMNI-360. FIG. 86: OMNI-361. FIG. 87: OMNI-362. FIG. 88: OMNI-363. FIG. 89: OMNI-364. FIG. 90: OMNI-365. FIG. 91: OMNI-366. FIG. 92: OMNI-367. FIG. 93: OMNI-368. FIG. 94: OMNI-369. FIG. 95: OMNI-370. FIG. 96: OMNI-371. FIG. 97: OMNI-372. FIG. 98: OMNI-373. FIG. 99: OMNI-375. FIG. 100: OMNI-376. FIG. 101: OMNI-377. FIG. 102: OMNI-378. FIG. 103: OMNI-380. FIG. 104: OMNI-381. FIG. 105: OMNI-382. FIG. 106: OMNI-383. FIG. 107: OMNI-384. FIG. 108: OMNI-385. FIG. 109: OMNI-386.

### DETAILED DESCRIPTION

[0022] According to some aspects of the invention, the disclosed compositions comprise a Clustered Regularly Interspaced Short Palindromic Repeats (CRISPR) nuclease and/or a nucleic acid molecule comprising a sequence encoding the same.

[0023] Table 1 lists novel CRISPR nucleases, as well as substitutions at one or more positions within each nuclease which convert the nuclease to a nickase or catalytically dead nuclease.

[0024] Table 2 provides crRNA, tracrRNA, and single-guide RNA (sgRNA) sequences, and portions of crRNA, tracrRNA, and sgRNA sequences, that are compatible with each listed CRISPR nuclease. Accordingly, a crRNA molecule capable of binding and targeting an OMNI nuclease listed in Table 2 as part of a crRNA:tracrRNA complex may comprise any crRNA sequence listed in Table 2. Similarly, a tracrRNA molecule capable of binding and targeting an OMNI nuclease listed in Table 2 as part of a crRNA:tracrRNA complex may comprise any tracrRNA sequence listed in Table 2. Also, a single-guide RNA molecule capable of binding and targeting an OMNI nuclease listed in Table 2 may comprise any sequence listed in Table 2.

[0025] For example, a crRNA molecule of OMNI-263 nuclease (SEQ ID NO: 1) may comprise a sequence of any one of SEQ ID NOs: 326-329; a tracrRNA molecule of OMNI-263 nuclease may comprise a sequence of any one of SEQ ID NOs: 330-338; and a sgRNA molecule of OMNI-263 nuclease may comprise a sequence of any one of SEQ ID NOs: 325-338. Other crRNA molecules, tracrRNA molecules, or sgRNA molecules for each OMNI nuclease may be derived from the sequences listed in Table 2 in the same manner.

[0026] Any one of these nucleases can target a desired DNA target sequence via a guide RNA molecule. The nuclease-guide complex will also carry any molecule attached to the complex to the target site. Thus, this disclosure also contemplates fusion proteins comprising CRISPR nucleases and a DNA modifying domain (e.g., a deaminase, a nuclease, a nickase, a recombinase, a methyltransferase, a methylase, an acetylase, an acetyltransferase, a transcriptional activator, or a transcriptional repressor domain), as well as the use of such fusion proteins in correcting mutations in a genome (e.g., the genome of a human subject) that are associated with disease, or generating mutations in a genome (e.g., the human genome) to decrease or prevent expression of a gene.

[0027] In some embodiments, any of the CRISPR nucleases provided herein may be fused to a protein that has an enzymatic activity. In some embodiments, the enzymatic activity modifies a target DNA. In some embodiments, the enzymatic activity is nuclease activity, methyltransferase activity, demethylase activity, DNA repair activity, DNA damage activity, deamination activity, dismutase activity, alkylation activity, depurination activity, oxidation activity, pyrimidine dimer forming activity, integrase activity, transposase activity, recombinase activity, polymerase activity, ligase activity, helicase activity, photolyase activity or glycosylase activity. In some cases, the enzymatic activity is nuclease activity. In some cases, the nuclease activity introduces a double strand break in the target DNA. In some cases, the enzymatic activity modifies a target polypeptide associated with the target DNA. In some cases, the enzymatic activity is methyltransferase activity, demethylase activity, acetyltransferase activity, deacetylase activity, kinase activity, phosphatase activity, ubiquitin ligase activity, deubiquitinating activity, adenylation activity, deadenylation activity, SUMOylating activity, deSUMOylating activity, ribosylation activity, deribosylation activity, myristoylation activity or demyristoylation activity. In some cases, the target polypeptide is a histone and the enzymatic activity is methyltransferase activity, demethylase activity, acetyltransferase activity, deacetylase activity, kinase activity, phosphatase activity, ubiquitin ligase activity or deubiquitinating activity.

[0028] Thus, any one of the CRISPR nucleases, nickases, or dead-nucleases may be fused (e.g. directly fused or fused via a linker) to another DNA modulating or DNA modifying enzyme, including, but not limited to, base editors such as a deaminase, a reverse transcriptase (e.g. for use in prime editing, see Anzaolone et al. (2019)), an enzyme that modifies the methylation state of DNA (e.g. a methyltransferase), or a modifier of histones (e.g. a histone acetyl transferase). Indeed, the OMNI-50 nucleases, nickases, inactive nucleases described herein may be fused to a DNA modifying enzyme or an effector domain thereof. Examples of DNA modifiers include but are not limited to: a deaminase, a nuclease, a nickase, a recombinase, a methyltransferase, a methylase, an acetylase, an acetyltransferase, a reverse transcriptase, an helicase, an integrase, a ligase, a transposase, a demethylase, a phosphatase, a transcriptional activator, or a transcriptional repressor. In some embodiments, any of the CRISPR nucleases provided herein are fused to a protein that has an enzymatic activity. In some embodiments, the enzymatic activity modifies a target DNA molecule. In some embodiments, the CRISPR nucleases described herein or fusion proteins thereof, may be used to correct or generate one or more mutations in a gene associated with disease, or to increase, correct, decrease or prevent expression of a gene.

[0029] The invention provides a non-naturally occurring composition comprising a CRISPR nuclease comprising a sequence having at least 90% identity to the amino acid sequence selected from the group consisting of SEQ ID NOs: 13, 1-12, and 14-108, or a nucleic acid molecule comprising a sequence encoding the CRISPR nuclease.

[0030] In some embodiments, the composition further comprises one or more RNA molecules, or a DNA polynucleotide encoding any one of the one or more RNA molecules, wherein the one or more RNA molecules and the CRISPR nuclease do not naturally occur together and the one or more RNA molecules are configured to form a complex with the CRISPR nuclease and/or target the complex to a target site.

[0031] In some embodiments, the CRISPR nuclease comprises a sequence having at least 90% identity to the amino acid sequence set forth in SEQ ID NO: 1, and at least one RNA molecule comprises a sequence selected from the group consisting of SEQ ID NOs: 325-338.

[0032] In some embodiments, the CRISPR nuclease comprises a sequence having at least 90% identity to the amino acid sequence set forth in SEQ ID NO: 1 and at least one RNA molecule is a CRISPR RNA (crRNA) molecule comprising a guide sequence portion and a sequence selected from the group consisting of SEQ ID NOs: 326-329.

[0033] In some embodiments, the composition further comprises a transactivating CRISPR RNA (tracrRNA) molecule comprising a sequence set forth in the group consisting of SEQ ID NOs: 330-338.

[0034] In some embodiments, the CRISPR nuclease comprises a sequence having at least 90% identity to the amino acid sequence set forth in SEQ ID NO: 1 and at least one RNA molecule is a single-guide RNA (sgRNA) molecule comprising a guide sequence portion and a sequence selected from the group consisting of SEQ ID NOs: 325-338.

[0035] In some embodiments, the CRISPR nuclease comprises a sequence having at least 90% identity to the amino acid sequence set forth in SEQ ID NO: 2, and at least one RNA molecule comprises a sequence selected from the group consisting of SEQ ID NOs: 339-352.

[0036] In some embodiments, the CRISPR nuclease comprises a sequence having at least 90% identity to the amino acid sequence set forth in SEQ ID NO: 2 and at least one RNA molecule is a CRISPR RNA (crRNA) molecule comprising a guide sequence portion and a sequence selected from the group consisting of SEQ ID NOs: 340-343.

[0037] In some embodiments, the composition further comprises a transactivating CRISPR RNA (tracrRNA) molecule comprising a sequence set forth in the group consisting of SEQ ID NOs: 344-352.

[0038] In some embodiments, the CRISPR nuclease comprises a sequence having at least 90% identity to the amino acid sequence set forth in SEQ ID NO: 2 and at least one RNA molecule is a single-guide RNA (sgRNA) molecule comprising a guide sequence portion and a sequence selected from the group consisting of SEQ ID NOs: 339-352.

[0039] In some embodiments, the CRISPR nuclease comprises a sequence having at least 90% identity to the amino acid sequence set forth in SEQ ID NO: 3, and at least one RNA molecule comprises a sequence selected from the group consisting of SEQ ID NOs: 353-368.

[0040] In some embodiments, the CRISPR nuclease comprises a sequence having at least 90% identity to the amino acid sequence set forth in SEQ ID NO: 3 and at least one RNA molecule is a CRISPR RNA (crRNA) molecule comprising a guide sequence portion and a sequence selected from the group consisting of SEQ ID NOs: 354-357.

[0041] In some embodiments, the composition further comprises a transactivating CRISPR RNA (tracrRNA) molecule comprising a sequence set forth in the group consisting of SEQ ID NOs: 358-368.

[0042] In some embodiments, the CRISPR nuclease comprises a sequence having at least 90% identity to the amino acid sequence set forth in SEQ ID NO: 3 and at least one RNA molecule is a single-guide RNA (sgRNA) molecule comprising a guide sequence portion and a sequence selected from the group consisting of SEQ ID NOs: 353-368.

[0043] In some embodiments, the CRISPR nuclease comprises a sequence having at least 90% identity to the amino acid sequence set forth in SEQ ID NO: 4 and at least one RNA molecule comprises a sequence selected from the group consisting of SEQ ID NOs: 369-380.

[0044] In some embodiments, the CRISPR nuclease comprises a sequence having at least 90% identity to the amino acid sequence set forth in SEQ ID NO: 4 and at least one RNA molecule is a CRISPR RNA (crRNA) molecule comprising a guide sequence portion and a sequence selected from the group consisting of SEQ ID NOs: 370-373 and 114.

[0045] In some embodiments, the composition further comprises a transactivating CRISPR RNA (tracrRNA) molecule comprising a sequence set forth in the group consisting of SEQ ID NOs: 374-380.

[0046] In some embodiments, the CRISPR nuclease comprises a sequence having at least 90% identity to the amino acid sequence set forth in SEQ ID NO: 4 and at least one RNA molecule is a single-guide RNA (sgRNA) molecule comprising a guide sequence portion and a sequence selected from the group consisting of SEQ ID NOs: 369-380.

[0047] In some embodiments, the CRISPR nuclease comprises a sequence having at least 90% identity to the amino acid sequence set forth in SEQ ID NO: 5, and at least one RNA molecule comprises a sequence selected from the group consisting of SEQ ID NOs: 381-395.

[0048] In some embodiments, the CRISPR nuclease comprises a sequence having at least 90% identity to the amino acid sequence set forth in SEQ ID NO: 5 and at least one RNA molecule is a CRISPR RNA (crRNA) molecule comprising a guide sequence portion and a sequence selected from the group consisting of SEQ ID NOs: 382-385.

[0049] In some embodiments, the composition further comprises a transactivating CRISPR RNA (tracrRNA) molecule comprising a sequence set forth in the group consisting of SEQ ID NOs: 386-395.

[0050] In some embodiments, the CRISPR nuclease comprises a sequence having at least 90% identity to the amino acid sequence set forth in SEQ ID NO: 5 and at least one RNA molecule is a single-guide RNA (sgRNA) molecule comprising a guide sequence portion and a sequence selected from the group consisting of SEQ ID NOs: 381-395.

[0051] In some embodiments, the CRISPR nuclease comprises a sequence having at least 90% identity to the amino acid sequence set forth in SEQ ID NO: 6 and at least one RNA molecule comprises a sequence selected from the group consisting of SEQ ID NOs: 396-409.

[0052] In some embodiments, the CRISPR nuclease comprises a sequence having at least 90% identity to the amino acid sequence set forth in SEQ ID NO: 6 and at least one RNA molecule is a CRISPR RNA (crRNA) molecule comprising a guide sequence portion and a sequence selected from the group consisting of SEQ ID NOs: 397-400.

[0053] In some embodiments, the composition further comprises a transactivating CRISPR RNA (tracrRNA) molecule comprising a sequence set forth in the group consisting of SEQ ID NOs: 401-409.

[0054] In some embodiments, the CRISPR nuclease comprises a sequence having at least 90% identity to the amino acid sequence set forth in SEQ ID NO: 6 and at least one RNA molecule is a single-guide RNA (sgRNA) molecule comprising a guide sequence portion and a sequence selected from the group consisting of SEQ ID NOs: 396-409.

[0055] In some embodiments, the CRISPR nuclease comprises a sequence having at least 90% identity to the amino acid sequence set forth in SEQ ID NO: 7 and at least one RNA molecule comprises a sequence selected from the group consisting of SEQ ID NOs: 410-433.

[0056] In some embodiments, the CRISPR nuclease comprises a sequence having at least 90% identity to the amino acid sequence set forth in SEQ ID NO: 7 and at least one RNA molecule is a CRISPR RNA (crRNA) molecule comprising a guide sequence portion and a sequence selected from the group consisting of SEQ ID NOs: 411-414.

[0057] In some embodiments, the composition further comprises a transactivating CRISPR RNA (tracrRNA) molecule comprising a sequence set forth in the group consisting of SEQ ID NOs: 415-433.

[0058] In some embodiments, the CRISPR nuclease comprises a sequence having at least 90% identity to the amino acid sequence set forth in SEQ ID NO: 7 and at least one RNA molecule is a single-guide RNA (sgRNA) molecule comprising a guide sequence portion and a sequence selected from the group consisting of SEQ ID NOs: 410-433.

[0059] In some embodiments, the CRISPR nuclease comprises a sequence having at least 90% identity to the amino acid sequence set forth in SEQ ID NO: 8 and at least one RNA molecule comprises a sequence selected from the group consisting of SEQ ID NOs: 434-447.

[0060] In some embodiments, the CRISPR nuclease comprises a sequence having at least 90% identity to the amino acid sequence set forth in SEQ ID NO: 8 and at least one RNA molecule is a CRISPR RNA (crRNA) molecule comprising a guide sequence portion and a sequence selected from the group consisting of SEQ ID NOs: 435-437.

[0061] In some embodiments, the composition further comprises a transactivating CRISPR RNA (tracrRNA) molecule comprising a sequence set forth in the group consisting of SEQ ID NOs: 438-447.

[0062] In some embodiments, the CRISPR nuclease comprises a sequence having at least 90% identity to the amino acid sequence set forth in SEQ ID NO: 8 and at least one RNA molecule is a single-guide RNA (sgRNA) molecule comprising a guide sequence portion and a sequence selected from the group consisting of SEQ ID NOs: 434-447.

[0063] In some embodiments, the CRISPR nuclease comprises a sequence having at least 90% identity to the amino acid sequence set forth in SEQ ID NO: 9 and at least one RNA molecule comprises a sequence selected from the group consisting of SEQ ID NOs: 448-461.

[0064] In some embodiments, the CRISPR nuclease comprises a sequence having at least 90% identity to the amino acid sequence set forth in SEQ ID NO: 9 and at least one RNA molecule is a CRISPR RNA (crRNA) molecule comprising a guide sequence portion and a sequence selected from the group consisting of SEQ ID NOs: 449-452.

[0065] In some embodiments, the composition further comprises a transactivating CRISPR RNA (tracrRNA) molecule comprising a sequence set forth in the group consisting of SEQ ID NOs: 453-461.

[0066] In some embodiments, the CRISPR nuclease comprises a sequence having at least 90% identity to the amino acid sequence set forth in SEQ ID NO: 9 and at least one RNA molecule is a single-guide RNA (sgRNA) molecule comprising a guide sequence portion and a sequence selected from the group consisting of SEQ ID NOs: 448-461.

[0067] In some embodiments, the CRISPR nuclease comprises a sequence having at least 90% identity to the amino acid sequence set forth in SEQ ID NO: 10, and at least one RNA molecule comprises a sequence selected from the group consisting of SEQ ID NOs: 462-475.

[0068] In some embodiments, the CRISPR nuclease comprises a sequence having at least 90% identity to the amino acid sequence set forth in SEQ ID NO: 10 and at least one RNA molecule is a CRISPR RNA (crRNA) molecule comprising a guide sequence portion and a sequence selected from the group consisting of SEQ ID NOs: 463-466.

[0069] In some embodiments, the composition further comprises a transactivating CRISPR RNA (tracrRNA) molecule comprising a sequence set forth in the group consisting of SEQ ID NOs: 467-475.

[0070] In some embodiments, the CRISPR nuclease comprises a sequence having at least 90% identity to the amino acid sequence set forth in SEQ ID NO: 10 and at least one RNA molecule is a single-guide RNA (sgRNA) molecule comprising a guide sequence portion and a sequence selected from the group consisting of SEQ ID NOs: 462-475.

[0071] In some embodiments, the CRISPR nuclease comprises a sequence having at least 90% identity to the amino acid sequence set forth in SEQ ID NO: 11, and at least one RNA molecule comprises a sequence selected from the group consisting of SEQ ID NOs: 476-491.

[0072] In some embodiments, the CRISPR nuclease comprises a sequence having at least 90% identity to the amino acid sequence set forth in SEQ ID NO: 11 and at least one RNA molecule is a CRISPR RNA (crRNA) molecule comprising a guide sequence portion and a sequence selected from the group consisting of SEQ ID NOs: 477-480.

[0073] In some embodiments, the composition further comprises a transactivating CRISPR RNA (tracrRNA) molecule comprising a sequence set forth in the group consisting of SEQ ID NOs: 481-491.

[0074] In some embodiments, the CRISPR nuclease comprises a sequence having at least 90% identity to the amino acid sequence set forth in SEQ ID NO: 11 and at least one RNA molecule is a single-guide RNA (sgRNA) molecule comprising a guide sequence portion and a sequence selected from the group consisting of SEQ ID NOs: 476-491.

[0075] In some embodiments, the CRISPR nuclease comprises a sequence having at least 90% identity to the amino acid sequence set forth in SEQ ID NO: 12, and at least one RNA molecule comprises a sequence selected from the group consisting of SEQ ID NOs: 492-512.

[0076] In some embodiments, the CRISPR nuclease comprises a sequence having at least 90% identity to the amino acid sequence set forth in SEQ ID NO: 12 and at least one RNA molecule is a CRISPR RNA (crRNA) molecule comprising a guide sequence portion and a sequence selected from the group consisting of SEQ ID NOs: 493-496 and 509-512.

[0077] In some embodiments, the composition further comprises a transactivating CRISPR RNA (tracrRNA) molecule comprising a sequence set forth in the group consisting of SEQ ID NOs: 497-507.

[0078] In some embodiments, the CRISPR nuclease comprises a sequence having at least 90% identity to the amino acid sequence set forth in SEQ ID NO: 12 and at least one RNA molecule is a single-guide RNA (sgRNA) molecule comprising a guide sequence portion and a sequence selected from the group consisting of SEQ ID NOs: 492-512.

[0079] In some embodiments, the CRISPR nuclease comprises a sequence having at least 90% identity to the amino acid sequence set forth in SEQ ID NO: 13, and at least one RNA molecule comprises a sequence selected from the group consisting of SEQ ID NOs: 513-535.

[0080] In some embodiments, the CRISPR nuclease comprises a sequence having at least 90% identity to the amino acid sequence set forth in SEQ ID NO: 13 and at least one RNA molecule is a CRISPR RNA (crRNA) molecule comprising a guide sequence portion and a sequence selected from the group consisting of SEQ ID NOs: 514-517 and 528-531.

[0081] In some embodiments, the composition further comprises a transactivating CRISPR RNA (tracrRNA) molecule comprising a sequence set forth in the group consisting of SEQ ID NOs: 518-526 and 532-535.

[0082] In some embodiments, the CRISPR nuclease comprises a sequence having at least 90% identity to the amino acid sequence set forth in SEQ ID NO: 13 and at least one RNA molecule is a single-guide RNA (sgRNA) molecule comprising a guide sequence portion and a sequence selected from the group consisting of SEQ ID NOs: 513-535.

[0083] In some embodiments, the CRISPR nuclease comprises a sequence having at least 90% identity to the amino acid sequence set forth in SEQ ID NO: 14, and at least one RNA molecule comprises a sequence selected from the group consisting of SEQ ID NOs: 536-549.

[0084] In some embodiments, the CRISPR nuclease comprises a sequence having at least 90% identity to the amino acid sequence set forth in SEQ ID NO: 14 and at least one RNA molecule is a CRISPR RNA (crRNA) molecule comprising a guide sequence portion and a sequence selected from the group consisting of SEQ ID NOs: 537-540.

[0085] In some embodiments, the composition further comprises a transactivating CRISPR RNA (tracrRNA) molecule comprising a sequence set forth in the group consisting of SEQ ID NOs: 541-549.

[0086] In some embodiments, the CRISPR nuclease comprises a sequence having at least 90% identity to the amino acid sequence set forth in SEQ ID NO: 14 and at least one RNA molecule is a single-guide RNA (sgRNA) molecule comprising a guide sequence portion and a sequence selected from the group consisting of SEQ ID NOs: 536-549.

[0087] In some embodiments, the CRISPR nuclease comprises a sequence having at least 90% identity to the amino acid sequence set forth in SEQ ID NO: 15, and at least one RNA molecule comprises a sequence selected from the group consisting of SEQ ID NOs: 550-575.

[0088] In some embodiments, the CRISPR nuclease comprises a sequence having at least 90% identity to the amino acid sequence set forth in SEQ ID NO: 15 and at least one RNA molecule is a CRISPR RNA (crRNA) molecule comprising a guide sequence portion and a sequence selected from the group consisting of SEQ ID NOs: 551-553.

[0089] In some embodiments, the composition further comprises a transactivating CRISPR RNA (tracrRNA) molecule comprising a sequence set forth in the group consisting of SEQ ID NOs: 554-563, 565-569, and 571-575.

[0090] In some embodiments, the CRISPR nuclease comprises a sequence having at least 90% identity to the amino acid sequence set forth in SEQ ID NO: 15 and at least one RNA molecule is a single-guide RNA (sgRNA) molecule comprising a guide sequence portion and a sequence selected from the group consisting of SEQ ID NOs: 550-575.

[0091] In some embodiments, the CRISPR nuclease comprises a sequence having at least 90% identity to the amino acid sequence set forth in SEQ ID NO: 16, and at least one RNA molecule comprises a sequence selected from the group consisting of SEQ ID NOs: 576-598.

[0092] In some embodiments, the CRISPR nuclease comprises a sequence having at least 90% identity to the amino acid sequence set forth in SEQ ID NO: 16 and at least one RNA molecule is a CRISPR RNA (crRNA) molecule comprising a guide sequence portion and a sequence selected from the group consisting of SEQ ID NOs: 577-580.

[0093] In some embodiments, the composition further comprises a transactivating CRISPR RNA (tracrRNA) molecule comprising a sequence set forth in the group consisting of SEQ ID NOs: 581-589 and 591-598.

[0094] In some embodiments, the CRISPR nuclease comprises a sequence having at least 90% identity to the amino acid sequence set forth in SEQ ID NO: 16 and at least one RNA molecule is a single-guide RNA (sgRNA) molecule comprising a guide sequence portion and a sequence selected from the group consisting of SEQ ID NOs: 576-598.

[0095] In some embodiments, the CRISPR nuclease comprises a sequence having at least 90% identity to the amino acid sequence set forth in SEQ ID NO: 17, and at least one RNA molecule comprises a sequence selected from the group consisting of SEQ ID NOs: 599-612.

[0096] In some embodiments, the CRISPR nuclease comprises a sequence having at least 90% identity to the amino acid sequence set forth in SEQ ID NO: 17 and at least one RNA molecule is a CRISPR RNA (crRNA) molecule comprising a guide sequence portion and a sequence selected from the group consisting of SEQ ID NOs: 600-603 and 201.

[0097] In some embodiments, the composition further comprises a transactivating CRISPR RNA (tracrRNA) molecule comprising a sequence set forth in the group consisting of SEQ ID NOs: 604-612.

[0098] In some embodiments, the CRISPR nuclease comprises a sequence having at least 90% identity to the amino acid sequence set forth in SEQ ID NO: 17 and at least one RNA molecule is a single-guide RNA (sgRNA) molecule comprising a guide sequence portion and a sequence selected from the group consisting of SEQ ID NOs: 599-612.

[0099] In some embodiments, the CRISPR nuclease comprises a sequence having at least 90% identity to the amino acid sequence set forth in SEQ ID NO: 18, and at least one RNA molecule comprises a sequence selected from the group consisting of SEQ ID NOs: 613-633.

[0100] In some embodiments, the CRISPR nuclease comprises a sequence having at least 90% identity to the amino acid sequence set forth in SEQ ID NO: 18 and at least one RNA molecule is a CRISPR RNA (crRNA) molecule comprising a guide sequence portion and a sequence selected from the group consisting of SEQ ID NOs: 614-617 and 630.

[0101] In some embodiments, the composition further comprises a transactivating CRISPR RNA (tracrRNA) molecule comprising a sequence set forth in the group consisting of SEQ ID NOs: 618-628 and 631-633.

[0102] In some embodiments, the CRISPR nuclease comprises a sequence having at least 90% identity to the amino acid sequence set forth in SEQ ID NO: 18 and at least one RNA molecule is a single-guide RNA (sgRNA) molecule comprising a guide sequence portion and a sequence selected from the group consisting of SEQ ID NOs: 613-633.

[0103] In some embodiments, the CRISPR nuclease comprises a sequence having at least 90% identity to the amino acid sequence set forth in SEQ ID NO: 19, and at least one RNA molecule comprises a sequence selected from the group consisting of SEQ ID NOs: 634-651.

[0104] In some embodiments, the CRISPR nuclease comprises a sequence having at least 90% identity to the amino acid sequence set forth in SEQ ID NO: 19 and at least one RNA molecule is a CRISPR RNA (crRNA) molecule comprising a guide sequence portion and a sequence selected from the group consisting of SEQ ID NOs: 635-638.

[0105] In some embodiments, the composition further comprises a transactivating CRISPR RNA (tracrRNA) molecule comprising a sequence set forth in the group consisting of SEQ ID NOs: 639-647 and 649-651.

[0106] In some embodiments, the CRISPR nuclease comprises a sequence having at least 90% identity to the amino acid sequence set forth in SEQ ID NO: 19 and at least one RNA molecule is a single-guide RNA (sgRNA) molecule comprising a guide sequence portion and a sequence selected from the group consisting of SEQ ID NOs: 634-651.

[0107] In some embodiments, the CRISPR nuclease comprises a sequence having at least 90% identity to the amino acid sequence set forth in SEQ ID NO: 20, and at least one RNA molecule comprises a sequence selected from the group consisting of SEQ ID NOs: 652-665.

[0108] In some embodiments, the CRISPR nuclease comprises a sequence having at least 90% identity to the amino acid sequence set forth in SEQ ID NO: 20 and at least one RNA molecule is a CRISPR RNA (crRNA) molecule comprising a guide sequence portion and a sequence selected from the group consisting of SEQ ID NOs: 653-656.

[0109] In some embodiments, the composition further comprises a transactivating CRISPR RNA (tracrRNA) molecule comprising a sequence set forth in the group consisting of SEQ ID NOs: 657-665.

[0110] In some embodiments, the CRISPR nuclease comprises a sequence having at least 90% identity to the amino acid sequence set forth in SEQ ID NO: 20 and at least one RNA molecule is a single-guide RNA (sgRNA) molecule comprising a guide sequence portion and a sequence selected from the group consisting of SEQ ID NOs: 652-665.

[0111] In some embodiments, the CRISPR nuclease comprises a sequence having at least 90% identity to the amino acid sequence set forth in SEQ ID NO: 21, and at least one RNA molecule comprises a sequence selected from the group consisting of SEQ ID NOs: 666-683 and UUGCUACAA.

[0112] In some embodiments, the CRISPR nuclease comprises a sequence having at least 90% identity to the amino acid sequence set forth in SEQ ID NO: 21 and at least one RNA molecule is a CRISPR RNA (crRNA) molecule comprising a guide sequence portion and a sequence selected from the group consisting of SEQ ID NOs: 667-670 and 680.

[0113] In some embodiments, the composition further comprises a transactivating CRISPR RNA (tracrRNA) molecule comprising a sequence set forth in the group consisting of SEQ ID NOs: 671-678, 681-683, and UUGCUACAA.

[0114] In some embodiments, the CRISPR nuclease comprises a sequence having at least 90% identity to the amino acid sequence set forth in SEQ ID NO: 21 and at least one RNA molecule is a single-guide RNA (sgRNA) molecule comprising a guide sequence portion and a sequence selected from the group consisting of SEQ ID NOs: 666-683 and UUGCUACAA.

[0115] In some embodiments, the CRISPR nuclease comprises a sequence having at least 90% identity to the amino acid sequence set forth in SEQ ID NO: 22, and at least one RNA molecule comprises a sequence selected from the group consisting of SEQ ID NOs: 684-707.

[0116] In some embodiments, the CRISPR nuclease comprises a sequence having at least 90% identity to the amino acid sequence set forth in SEQ ID NO: 22 and at least one RNA molecule is a CRISPR RNA (crRNA) molecule comprising a guide sequence portion and a sequence selected from the group consisting of SEQ ID NOs: 685-688.

[0117] In some embodiments, the composition further comprises a transactivating CRISPR RNA (tracrRNA) molecule comprising a sequence set forth in the group consisting of SEQ ID NOs: 689-697, 699-703, and 705-707.

[0118] In some embodiments, the CRISPR nuclease comprises a sequence having at least 90% identity to the amino acid sequence set forth in SEQ ID NO: 22 and at least one RNA molecule is a single-guide RNA (sgRNA) molecule comprising a guide sequence portion and a sequence selected from the group consisting of SEQ ID NOs: 684-707.

[0119] In some embodiments, the CRISPR nuclease comprises a sequence having at least 90% identity to the amino acid sequence set forth in SEQ ID NO: 23, and at least one RNA molecule comprises a sequence selected from the group consisting of SEQ ID NOs: 708-728.

[0120] In some embodiments, the CRISPR nuclease comprises a sequence having at least 90% identity to the amino acid sequence set forth in SEQ ID NO: 23 and at least one RNA molecule is a CRISPR RNA (crRNA) molecule comprising a guide sequence portion and a sequence selected from the group consisting of SEQ ID NOs: 709-712 and 721-724.

[0121] In some embodiments, the composition further comprises a transactivating CRISPR RNA (tracrRNA) molecule comprising a sequence set forth in the group consisting of SEQ ID NOs: 713-719 and 725-728.

[0122] In some embodiments, the CRISPR nuclease comprises a sequence having at least 90% identity to the amino acid sequence set forth in SEQ ID NO: 23 and at least one RNA molecule is a single-guide RNA (sgRNA) molecule comprising a guide sequence portion and a sequence selected from the group consisting of SEQ ID NOs: 708-728.

[0123] In some embodiments, the CRISPR nuclease comprises a sequence having at least 90% identity to the amino acid sequence set forth in SEQ ID NO: 24, and at least one RNA molecule comprises a sequence selected from the group consisting of SEQ ID NOs: 729-742.

[0124] In some embodiments, the CRISPR nuclease comprises a sequence having at least 90% identity to the amino acid sequence set forth in SEQ ID NO: 24 and at least one RNA molecule is a CRISPR RNA (crRNA) molecule comprising a guide sequence portion and a sequence selected from the group consisting of SEQ ID NOs: 730-733.

[0125] In some embodiments, the composition further comprises a transactivating CRISPR RNA (tracrRNA) molecule comprising a sequence set forth in the group consisting of SEQ ID NOs: 734-742.

[0126] In some embodiments, the CRISPR nuclease comprises a sequence having at least 90% identity to the amino acid sequence set forth in SEQ ID NO: 24 and at least one RNA molecule is a single-guide RNA (sgRNA) molecule comprising a guide sequence portion and a sequence selected from the group consisting of SEQ ID NOs: 729-742.

[0127] In some embodiments, the CRISPR nuclease comprises a sequence having at least 90% identity to the amino acid sequence set forth in SEQ ID NO: 25, and at least one RNA molecule comprises a sequence selected from the group consisting of SEQ ID NOs: 743-761.

[0128] In some embodiments, the CRISPR nuclease comprises a sequence having at least 90% identity to the amino acid sequence set forth in SEQ ID NO: 25 and at least one RNA molecule is a CRISPR RNA (crRNA) molecule comprising a guide sequence portion and a sequence selected from the group consisting of SEQ ID NOs: 744-747.

[0129] In some embodiments, the composition further comprises a transactivating CRISPR RNA (tracrRNA) molecule comprising a sequence set forth in the group consisting of SEQ ID NOs: 748-756 and 758-761.

[0130] In some embodiments, the CRISPR nuclease comprises a sequence having at least 90% identity to the amino acid sequence set forth in SEQ ID NO: 25 and at least one RNA molecule is a single-guide RNA (sgRNA) molecule comprising a guide sequence portion and a sequence selected from the group consisting of SEQ ID NOs: 743-761.

[0131] In some embodiments, the CRISPR nuclease comprises a sequence having at least 90% identity to the amino acid sequence set forth in SEQ ID NO: 26, and at least one RNA molecule comprises a sequence selected from the group consisting of SEQ ID NOs: 762-775.

[0132] In some embodiments, the CRISPR nuclease comprises a sequence having at least 90% identity to the amino acid sequence set forth in SEQ ID NO: 26 and at least one RNA molecule is a CRISPR RNA (crRNA) molecule comprising a guide sequence portion and a sequence selected from the group consisting of SEQ ID NOs: 763-766.

[0133] In some embodiments, the composition further comprises a transactivating CRISPR RNA (tracrRNA) molecule comprising a sequence set forth in the group consisting of SEQ ID NOs: 767-775.

[0134] In some embodiments, the CRISPR nuclease comprises a sequence having at least 90% identity to the amino acid sequence set forth in SEQ ID NO: 26 and at least one RNA molecule is a single-guide RNA (sgRNA) molecule comprising a guide sequence portion and a sequence selected from the group consisting of SEQ ID NOs: 762-775.

[0135] In some embodiments, the CRISPR nuclease comprises a sequence having at least 90% identity to the amino acid sequence set forth in SEQ ID NO: 27, and at least one RNA molecule comprises a sequence selected from the group consisting of SEQ ID NOs: 776-798.

[0136] In some embodiments, the CRISPR nuclease comprises a sequence having at least 90% identity to the amino acid sequence set forth in SEQ ID NO: 27 and at least one RNA molecule is a CRISPR RNA (crRNA) molecule comprising a guide sequence portion and a sequence selected from the group consisting of SEQ ID NOs: 777-780.

[0137] In some embodiments, the composition further comprises a transactivating CRISPR RNA (tracrRNA) molecule comprising a sequence set forth in the group consisting of SEQ ID NOs: 781-789, 791-794, and 796-798.

[0138] In some embodiments, the CRISPR nuclease comprises a sequence having at least 90% identity to the amino acid sequence set forth in SEQ ID NO: 27 and at least one RNA molecule is a single-guide RNA (sgRNA) molecule comprising a guide sequence portion and a sequence selected from the group consisting of SEQ ID NOs: 776-798.

[0139] In some embodiments, the CRISPR nuclease comprises a sequence having at least 90% identity to the amino acid sequence set forth in SEQ ID NO: 28, and at least one RNA molecule comprises a sequence selected from the group consisting of SEQ ID NOs: 799-816.

[0140] In some embodiments, the CRISPR nuclease comprises a sequence having at least 90% identity to the amino acid sequence set forth in SEQ ID NO: 28 and at least one RNA molecule is a CRISPR RNA (crRNA) molecule comprising a guide sequence portion and a sequence selected from the group consisting of SEQ ID NOs: 800-803.

[0141] In some embodiments, the composition further comprises a transactivating CRISPR RNA (tracrRNA) molecule comprising a sequence set forth in the group consisting of SEQ ID NOs: 804-812 and 814-816.

[0142] In some embodiments, the CRISPR nuclease comprises a sequence having at least 90% identity to the amino acid sequence set forth in SEQ ID NO: 28 and at least one RNA molecule is a single-guide RNA (sgRNA) molecule comprising a guide sequence portion and a sequence selected from the group consisting of SEQ ID NOs: 799-816.

[0143] In some embodiments, the CRISPR nuclease comprises a sequence having at least 90% identity to the amino acid sequence set forth in SEQ ID NO: 29, and at least one RNA molecule comprises a sequence selected from the group consisting of SEQ ID NOs: 817-830.

[0144] In some embodiments, the CRISPR nuclease comprises a sequence having at least 90% identity to the amino acid sequence set forth in SEQ ID NO: 29 and at least one RNA molecule is a CRISPR RNA (crRNA) molecule comprising a guide sequence portion and a sequence selected from the group consisting of SEQ ID NOs: 818-821.

[0145] In some embodiments, the composition further comprises a transactivating CRISPR RNA (tracrRNA) molecule comprising a sequence set forth in the group consisting of SEQ ID NOs: 822-830.

[0146] In some embodiments, the CRISPR nuclease comprises a sequence having at least 90% identity to the amino acid sequence set forth in SEQ ID NO: 29 and at least one RNA molecule is a single-guide RNA (sgRNA) molecule comprising a guide sequence portion and a sequence selected from the group consisting of SEQ ID NOs: 817-830.

[0147] In some embodiments, the CRISPR nuclease comprises a sequence having at least 90% identity to the amino acid sequence set forth in SEQ ID NO: 30, and at least one RNA molecule comprises a sequence selected from the group consisting of SEQ ID NOs: 831-844.

[0148] In some embodiments, the CRISPR nuclease comprises a sequence having at least 90% identity to the amino acid sequence set forth in SEQ ID NO: 30 and at least one RNA molecule is a CRISPR RNA (crRNA) molecule comprising a guide sequence portion and a sequence selected from the group consisting of SEQ ID NOs: 832-835.

[0149] In some embodiments, the composition further comprises a transactivating CRISPR RNA (tracrRNA) molecule comprising a sequence set forth in the group consisting of SEQ ID NOs: 836-844.

[0150] In some embodiments, the CRISPR nuclease comprises a sequence having at least 90% identity to the amino acid sequence set forth in SEQ ID NO: 30 and at least one RNA molecule is a single-guide RNA (sgRNA) molecule comprising a guide sequence portion and a sequence selected from the group consisting of SEQ ID NOs: 831-844.

[0151] In some embodiments, the CRISPR nuclease comprises a sequence having at least 90% identity to the amino acid sequence set forth in SEQ ID NO: 31, and at least one RNA molecule comprises a sequence selected from the group consisting of SEQ ID NOs: 845-862.

[0152] In some embodiments, the CRISPR nuclease comprises a sequence having at least 90% identity to the amino acid sequence set forth in SEQ ID NO: 31 and at least one RNA molecule is a CRISPR RNA (crRNA) molecule comprising a guide sequence portion and a sequence selected from the group consisting of SEQ ID NOs: 846-849.

[0153] In some embodiments, the composition further comprises a transactivating CRISPR RNA (tracrRNA) molecule comprising a sequence set forth in the group consisting of SEQ ID NOs: 850-858 and 860-862.

[0154] In some embodiments, the CRISPR nuclease comprises a sequence having at least 90% identity to the amino acid sequence set forth in SEQ ID NO: 31 and at least one RNA molecule is a single-guide RNA (sgRNA) molecule comprising a guide sequence portion and a sequence selected from the group consisting of SEQ ID NOs: 845-862.

[0155] In some embodiments, the CRISPR nuclease comprises a sequence having at least 90% identity to the amino acid sequence set forth in SEQ ID NO: 32, and at least one RNA molecule comprises a sequence selected from the group consisting of SEQ ID NOs: 863-883.

[0156] In some embodiments, the CRISPR nuclease comprises a sequence having at least 90% identity to the amino acid sequence set forth in SEQ ID NO: 32 and at least one RNA molecule is a CRISPR RNA (crRNA) molecule comprising a guide sequence portion and a sequence selected from the group consisting of SEQ ID NOs: 864-867 and 880-883.

[0157] In some embodiments, the composition further comprises a transactivating CRISPR RNA (tracrRNA) molecule comprising a sequence set forth in the group consisting of SEQ ID NOs: 868-878.

[0158] In some embodiments, the CRISPR nuclease comprises a sequence having at least 90% identity to the amino acid sequence set forth in SEQ ID NO: 32 and at least one RNA molecule is a single-guide RNA (sgRNA) molecule comprising a guide sequence portion and a sequence selected from the group consisting of SEQ ID NOs: 863-883.

[0159] In some embodiments, the CRISPR nuclease comprises a sequence having at least 90% identity to the amino acid sequence set forth in SEQ ID NO: 33, and at least one RNA molecule comprises a sequence selected from the group consisting of SEQ ID NOs: 884-901 and UUACUACAA.

[0160] In some embodiments, the CRISPR nuclease comprises a sequence having at least 90% identity to the amino acid sequence set forth in SEQ ID NO: 33 and at least one RNA molecule is a CRISPR RNA (crRNA) molecule comprising a guide sequence portion and a sequence selected from the group consisting of SEQ ID NOs: 885-888 and 898.

[0161] In some embodiments, the composition further comprises a transactivating CRISPR RNA (tracrRNA) molecule comprising a sequence set forth in the group consisting of SEQ ID NOs: 889-896, 899-901, and UUACUACAA.

[0162] In some embodiments, the CRISPR nuclease comprises a sequence having at least 90% identity to the amino acid sequence set forth in SEQ ID NO: 33 and at least one RNA molecule is a single-guide RNA (sgRNA) molecule comprising a guide sequence portion and a sequence selected from the group consisting of SEQ ID NOs: 884-901 and UUACUACAA.

[0163] In some embodiments, the CRISPR nuclease comprises a sequence having at least 90% identity to the amino acid sequence set forth in SEQ ID NO: 34, and at least one RNA molecule comprises a sequence selected from the group consisting of SEQ ID NOs: 902-915.

[0164] In some embodiments, the CRISPR nuclease comprises a sequence having at least 90% identity to the amino acid sequence set forth in SEQ ID NO: 34 and at least one RNA molecule is a CRISPR RNA (crRNA) molecule comprising a guide sequence portion and a sequence selected from the group consisting of SEQ ID NOs: 903-906.

[0165] In some embodiments, the composition further comprises a transactivating CRISPR RNA (tracrRNA) molecule comprising a sequence set forth in the group consisting of SEQ ID NOs: 907-915.

[0166] In some embodiments, the CRISPR nuclease comprises a sequence having at least 90% identity to the amino acid sequence set forth in SEQ ID NO: 34 and at least one RNA molecule is a single-guide RNA (sgRNA) molecule comprising a guide sequence portion and a sequence selected from the group consisting of SEQ ID NOs: 902-915.

[0167] In some embodiments, the CRISPR nuclease comprises a sequence having at least 90% identity to the amino acid sequence set forth in SEQ ID NO: 35, and at least one RNA molecule comprises a sequence selected from the group consisting of SEQ ID NOs: 916-931.

[0168] In some embodiments, the CRISPR nuclease comprises a sequence having at least 90% identity to the amino acid sequence set forth in SEQ ID NO: 35 and at least one RNA molecule is a CRISPR RNA (crRNA) molecule comprising a guide sequence portion and a sequence selected from the group consisting of SEQ ID NOs: 917-920 and 931.

[0169] In some embodiments, the composition further comprises a transactivating CRISPR RNA (tracrRNA) molecule comprising a sequence set forth in the group consisting of SEQ ID NOs: 921-929.

[0170] In some embodiments, the CRISPR nuclease comprises a sequence having at least 90% identity to the amino acid sequence set forth in SEQ ID NO: 35 and at least one RNA molecule is a single-guide RNA (sgRNA) molecule comprising a guide sequence portion and a sequence selected from the group consisting of SEQ ID NOs: 916-931.

[0171] In some embodiments, the CRISPR nuclease comprises a sequence having at least 90% identity to the amino acid sequence set forth in SEQ ID NO: 36, and at least one RNA molecule comprises a sequence selected from the group consisting of SEQ ID NOs: 932-947.

[0172] In some embodiments, the CRISPR nuclease comprises a sequence having at least 90% identity to the amino acid sequence set forth in SEQ ID NO: 36 and at least one RNA molecule is a CRISPR RNA (crRNA) molecule comprising a guide sequence portion and a sequence selected from the group consisting of SEQ ID NOs: 933-936.

[0173] In some embodiments, the composition further comprises a transactivating CRISPR RNA (tracrRNA) molecule comprising a sequence set forth in the group consisting of SEQ ID NOs: 937-947.

[0174] In some embodiments, the CRISPR nuclease comprises a sequence having at least 90% identity to the amino acid sequence set forth in SEQ ID NO: 36 and at least one RNA molecule is a single-guide RNA (sgRNA) molecule comprising a guide sequence portion and a sequence selected from the group consisting of SEQ ID NOs: 932-947.

[0175] In some embodiments, the CRISPR nuclease comprises a sequence having at least 90% identity to the amino acid sequence set forth in SEQ ID NO: 37, and at least one RNA molecule comprises a sequence selected from the group consisting of SEQ ID NOs: 948-962.

[0176] In some embodiments, the CRISPR nuclease comprises a sequence having at least 90% identity to the amino acid sequence set forth in SEQ ID NO: 37 and at least one RNA molecule is a CRISPR RNA (crRNA) molecule comprising a guide sequence portion and a sequence selected from the group consisting of SEQ ID NOs: 949-952.

[0177] In some embodiments, the composition further comprises a transactivating CRISPR RNA (tracrRNA) molecule comprising a sequence set forth in the group consisting of SEQ ID NOs: 953-962.

[0178] In some embodiments, the CRISPR nuclease comprises a sequence having at least 90% identity to the amino acid sequence set forth in SEQ ID NO: 37 and at least one RNA molecule is a single-guide RNA (sgRNA) molecule comprising a guide sequence portion and a sequence selected from the group consisting of SEQ ID NOs: 948-962.

[0179] In some embodiments, the CRISPR nuclease comprises a sequence having at least 90% identity to the amino acid sequence set forth in SEQ ID NO: 38, and at least one RNA molecule comprises a sequence selected from the group consisting of SEQ ID NOs: 963-985.

[0180] In some embodiments, the CRISPR nuclease comprises a sequence having at least 90% identity to the amino acid sequence set forth in SEQ ID NO: 38 and at least one RNA molecule is a CRISPR RNA (crRNA) molecule comprising a guide sequence portion and a sequence selected from the group consisting of SEQ ID NOs: 964-967 and 978-981.

[0181] In some embodiments, the composition further comprises a transactivating CRISPR RNA (tracrRNA) molecule comprising a sequence set forth in the group consisting of SEQ ID NOs: 968-976 and 982-985.

[0182] In some embodiments, the CRISPR nuclease comprises a sequence having at least 90% identity to the amino acid sequence set forth in SEQ ID NO: 38 and at least one RNA molecule is a single-guide RNA (sgRNA) molecule comprising a guide sequence portion and a sequence selected from the group consisting of SEQ ID NOs: 963-985.

[0183] In some embodiments, the CRISPR nuclease comprises a sequence having at least 90% identity to the amino acid sequence set forth in SEQ ID NO: 39, and at least one RNA molecule comprises a sequence selected from the group consisting of SEQ ID NOs: 986-1010.

[0184] In some embodiments, the CRISPR nuclease comprises a sequence having at least 90% identity to the amino acid sequence set forth in SEQ ID NO: 39 and at least one RNA molecule is a CRISPR RNA (crRNA) molecule comprising a guide sequence portion and a sequence selected from the group consisting of SEQ ID NOs: 987-990 and 1001-1004.

[0185] In some embodiments, the composition further comprises a transactivating CRISPR RNA (tracrRNA) molecule comprising a sequence set forth in the group consisting of SEQ ID NOs: 991-999 and 1005-1010.

[0186] In some embodiments, the CRISPR nuclease comprises a sequence having at least 90% identity to the amino acid sequence set forth in SEQ ID NO: 39 and at least one RNA molecule is a single-guide RNA (sgRNA) molecule comprising a guide sequence portion and a sequence selected from the group consisting of SEQ ID NOs: 986-1010.

[0187] In some embodiments, the CRISPR nuclease comprises a sequence having at least 90% identity to the amino acid sequence set forth in SEQ ID NO: 40, and at least one RNA molecule comprises a sequence selected from the group consisting of SEQ ID NOs: 1011-1029.

[0188] In some embodiments, the CRISPR nuclease comprises a sequence having at least 90% identity to the amino acid sequence set forth in SEQ ID NO: 40 and at least one RNA molecule is a CRISPR RNA (crRNA) molecule comprising a guide sequence portion and a sequence selected from the group consisting of SEQ ID NOs: 1012-1015 and 1026-1029.

[0189] In some embodiments, the composition further comprises a transactivating CRISPR RNA (tracrRNA) molecule comprising a sequence set forth in the group consisting of SEQ ID NOs: 1016-1024.

[0190] In some embodiments, the CRISPR nuclease comprises a sequence having at least 90% identity to the amino acid sequence set forth in SEQ ID NO: 40 and at least one RNA molecule is a single-guide RNA (sgRNA) molecule comprising a guide sequence portion and a sequence selected from the group consisting of SEQ ID NOs: 1011-1029.

[0191] In some embodiments, the CRISPR nuclease comprises a sequence having at least 90% identity to the amino acid sequence set forth in SEQ ID NO: 41, and at least one RNA molecule comprises a sequence selected from the group consisting of SEQ ID NOs: 1030-1050, UUACUAAAA, and UUACUAGAA.

[0192] In some embodiments, the CRISPR nuclease comprises a sequence having at least 90% identity to the amino acid sequence set forth in SEQ ID NO: 41 and at least one RNA molecule is a CRISPR RNA (crRNA) molecule comprising a guide sequence portion and a sequence selected from the group consisting of SEQ ID NOs: 1031-1034 and 1044-1047.

[0193] In some embodiments, the composition further comprises a transactivating CRISPR RNA (tracrRNA) molecule comprising a sequence set forth in the group consisting of SEQ ID NOs: 1035-1042, 1048-1050, UUACUAAAA, and UUACUAGAA.

[0194] In some embodiments, the CRISPR nuclease comprises a sequence having at least 90% identity to the amino acid sequence set forth in SEQ ID NO: 41 and at least one RNA molecule is a single-guide RNA (sgRNA) molecule comprising a guide sequence portion and a sequence selected from the group consisting of SEQ ID NOs: 1030-1050, UUACUAAAA, and UUACUAGAA.

[0195] In some embodiments, the CRISPR nuclease comprises a sequence having at least 90% identity to the amino acid sequence set forth in SEQ ID NO: 42, and at least one RNA molecule comprises a sequence selected from the group consisting of SEQ ID NOs: 1051-1080.

[0196] In some embodiments, the CRISPR nuclease comprises a sequence having at least 90% identity to the amino acid sequence set forth in SEQ ID NO: 42 and at least one RNA molecule is a CRISPR RNA (crRNA) molecule comprising a guide sequence portion and a sequence selected from the group consisting of SEQ ID NOs: 1052-1055 and 1068-1071.

[0197] In some embodiments, the composition further comprises a transactivating CRISPR RNA (tracrRNA) molecule comprising a sequence set forth in the group consisting of SEQ ID NOs: 1056-1066, 1072-1074, and 1076-1079.

[0198] In some embodiments, the CRISPR nuclease comprises a sequence having at least 90% identity to the amino acid sequence set forth in SEQ ID NO: 42 and at least one RNA molecule is a single-guide RNA (sgRNA) molecule comprising a guide sequence portion and a sequence selected from the group consisting of SEQ ID NOs: 1051-1080.

[0199] In some embodiments, the CRISPR nuclease comprises a sequence having at least 90% identity to the amino acid sequence set forth in SEQ ID NO: 43, and at least one RNA molecule comprises a sequence selected from the group consisting of SEQ ID NOs: 1081-1101, UUACUAAAA, and UUACUAGAA.

[0200] In some embodiments, the CRISPR nuclease comprises a sequence having at least 90% identity to the amino acid sequence set forth in SEQ ID NO: 43 and at least one RNA molecule is a CRISPR RNA (crRNA) molecule comprising a guide sequence portion and a sequence selected from the group consisting of SEQ ID NOs: 1082-1085 and 1095-1098.

[0201] In some embodiments, the composition further comprises a transactivating CRISPR RNA (tracrRNA) molecule comprising a sequence set forth in the group consisting of SEQ ID NOs: 1086-1093, 1099-1101, UUACUAAAA, and UUACUAGAA.

[0202] In some embodiments, the CRISPR nuclease comprises a sequence having at least 90% identity to the amino acid sequence set forth in SEQ ID NO: 43 and at least one RNA molecule is a single-guide RNA (sgRNA) molecule comprising a guide sequence portion and a sequence selected from the group consisting of SEQ ID NOs: 1081-1101, UUACUAAAA, and UUACUAGAA.

[0203] In some embodiments, the CRISPR nuclease comprises a sequence having at least 90% identity to the amino acid sequence set forth in SEQ ID NO: 44, and at least one RNA molecule comprises a sequence selected from the group consisting of SEQ ID NOs: 1102-1115.

[0204] In some embodiments, the CRISPR nuclease comprises a sequence having at least 90% identity to the amino acid sequence set forth in SEQ ID NO: 44 and at least one RNA molecule is a CRISPR RNA (crRNA) molecule comprising a guide sequence portion and a sequence selected from the group consisting of SEQ ID NOs: 1103-1106.

[0205] In some embodiments, the composition further comprises a transactivating CRISPR RNA (tracrRNA) molecule comprising a sequence set forth in the group consisting of SEQ ID NOs: 1107-1115.

[0206] In some embodiments, the CRISPR nuclease comprises a sequence having at least 90% identity to the amino acid sequence set forth in SEQ ID NO: 44 and at least one RNA molecule is a single-guide RNA (sgRNA) molecule comprising a guide sequence portion and a sequence selected from the group consisting of SEQ ID NOs: 1102-1115.

[0207] In some embodiments, the CRISPR nuclease comprises a sequence having at least 90% identity to the amino acid sequence set forth in SEQ ID NO: 45, and at least one RNA molecule comprises a sequence selected from the group consisting of SEQ ID NOs: 1116-1135.

[0208] In some embodiments, the CRISPR nuclease comprises a sequence having at least 90% identity to the amino acid sequence set forth in SEQ ID NO: 45 and at least one RNA molecule is a CRISPR RNA (crRNA) molecule comprising a guide sequence portion and a sequence selected from the group consisting of SEQ ID NOs: 1117-1120.

[0209] In some embodiments, the composition further comprises a transactivating CRISPR RNA (tracrRNA) molecule comprising a sequence set forth in the group consisting of SEQ ID NOs: 1121-1130 and 1132-1135.

[0210] In some embodiments, the CRISPR nuclease comprises a sequence having at least 90% identity to the amino acid sequence set forth in SEQ ID NO: 45 and at least one RNA molecule is a single-guide RNA (sgRNA) molecule comprising a guide sequence portion and a sequence selected from the group consisting of SEQ ID NOs: 1116-1135.

[0211] In some embodiments, the CRISPR nuclease comprises a sequence having at least 90% identity to the amino acid sequence set forth in SEQ ID NO: 46, and at least one RNA molecule comprises a sequence selected from the group consisting of SEQ ID NOs: 1136-1167.

[0212] In some embodiments, the CRISPR nuclease comprises a sequence having at least 90% identity to the amino acid sequence set forth in SEQ ID NO: 46 and at least one RNA molecule is a CRISPR RNA (crRNA) molecule comprising a guide sequence portion and a sequence selected from the group consisting of SEQ ID NOs: 1137-1140 and 1151-1154.

[0213] In some embodiments, the composition further comprises a transactivating CRISPR RNA (tracrRNA) molecule comprising a sequence set forth in the group consisting of SEQ ID NOs: 1141-1149, 1155-1158, 1160-1163, and 1167-1167.

[0214] In some embodiments, the CRISPR nuclease comprises a sequence having at least 90% identity to the amino acid sequence set forth in SEQ ID NO: 46 and at least one RNA molecule is a single-guide RNA (sgRNA) molecule comprising a guide sequence portion and a sequence selected from the group consisting of SEQ ID NOs: 1136-1167.

[0215] In some embodiments, the CRISPR nuclease comprises a sequence having at least 90% identity to the amino acid sequence set forth in SEQ ID NO: 47, and at least one RNA molecule comprises a sequence selected from the group consisting of SEQ ID NOs: 1168-1186.

[0216] In some embodiments, the CRISPR nuclease comprises a sequence having at least 90% identity to the amino acid sequence set forth in SEQ ID NO: 47 and at least one RNA molecule is a CRISPR RNA (crRNA) molecule comprising a guide sequence portion and a sequence selected from the group consisting of SEQ ID NOs: 1169-1172.

[0217] In some embodiments, the composition further comprises a transactivating CRISPR RNA (tracrRNA) molecule comprising a sequence set forth in the group consisting of SEQ ID NOs: 1173-1181 and 1183-1186.

[0218] In some embodiments, the CRISPR nuclease comprises a sequence having at least 90% identity to the amino acid sequence set forth in SEQ ID NO: 47 and at least one RNA molecule is a single-guide RNA (sgRNA) molecule comprising a guide sequence portion and a sequence selected from the group consisting of SEQ ID NOs: 1168-1186.

[0219] In some embodiments, the CRISPR nuclease comprises a sequence having at least 90% identity to the amino acid sequence set forth in SEQ ID NO: 48, and at least one RNA molecule comprises a sequence selected from the group consisting of SEQ ID NOs: 1187-1211.

[0220] In some embodiments, the CRISPR nuclease comprises a sequence having at least 90% identity to the amino acid sequence set forth in SEQ ID NO: 48 and at least one RNA molecule is a CRISPR RNA (crRNA) molecule comprising a guide sequence portion and a sequence selected from the group consisting of SEQ ID NOs: 1188-1191 and 1204-1207.

[0221] In some embodiments, the composition further comprises a transactivating CRISPR RNA (tracrRNA) molecule comprising a sequence set forth in the group consisting of SEQ ID NOs: 1192-1202 and 1208-1211.

[0222] In some embodiments, the CRISPR nuclease comprises a sequence having at least 90% identity to the amino acid sequence set forth in SEQ ID NO: 48 and at least one RNA molecule is a single-guide RNA (sgRNA) molecule comprising a guide sequence portion and a sequence selected from the group consisting of SEQ ID NOs: 1187-1211.

[0223] In some embodiments, the CRISPR nuclease comprises a sequence having at least 90% identity to the amino acid sequence set forth in SEQ ID NO: 49, and at least one RNA molecule comprises a sequence selected from the group consisting of SEQ ID NOs: 1212-1243.

[0224] In some embodiments, the CRISPR nuclease comprises a sequence having at least 90% identity to the amino acid sequence set forth in SEQ ID NO: 49 and at least one RNA molecule is a CRISPR RNA (crRNA) molecule comprising a guide sequence portion and a sequence selected from the group consisting of SEQ ID NOs: 1213-1216 and 1227-1230.

[0225] In some embodiments, the composition further comprises a transactivating CRISPR RNA (tracrRNA) molecule comprising a sequence set forth in the group consisting of SEQ ID NOs: 1217-1225, 1231-1234, 1236-1239, and 1241-1243.

[0226] In some embodiments, the CRISPR nuclease comprises a sequence having at least 90% identity to the amino acid sequence set forth in SEQ ID NO: 49 and at least one RNA molecule is a single-guide RNA (sgRNA) molecule comprising a guide sequence portion and a sequence selected from the group consisting of SEQ ID NOs: 1212-1243.

[0227] In some embodiments, the CRISPR nuclease comprises a sequence having at least 90% identity to the amino acid sequence set forth in SEQ ID NO: 50, and at least one RNA molecule comprises a sequence selected from the group consisting of SEQ ID NOs: 1244-1255.

[0228] In some embodiments, the CRISPR nuclease comprises a sequence having at least 90% identity to the amino acid sequence set forth in SEQ ID NO: 50 and at least one RNA molecule is a CRISPR RNA (crRNA) molecule comprising a guide sequence portion and a sequence selected from the group consisting of SEQ ID NOs: 1245-1247.

[0229] In some embodiments, the composition further comprises a transactivating CRISPR RNA (tracrRNA) molecule comprising a sequence set forth in the group consisting of SEQ ID NOs: 1248-1255.

[0230] In some embodiments, the CRISPR nuclease comprises a sequence having at least 90% identity to the amino acid sequence set forth in SEQ ID NO: 50 and at least one RNA molecule is a single-guide RNA (sgRNA) molecule comprising a guide sequence portion and a sequence selected from the group consisting of SEQ ID NOs: 1244-1255.

[0231] In some embodiments, the CRISPR nuclease comprises a sequence having at least 90% identity to the amino acid sequence set forth in SEQ ID NO: 51, and at least one RNA molecule comprises a sequence selected from the group consisting of SEQ ID NOs: 1256-1284.

[0232] In some embodiments, the CRISPR nuclease comprises a sequence having at least 90% identity to the amino acid sequence set forth in SEQ ID NO: 51 and at least one RNA molecule is a CRISPR RNA (crRNA) molecule comprising a guide sequence portion and a sequence selected from the group consisting of SEQ ID NOs: 1257-1260 and 1271-1274.

[0233] In some embodiments, the composition further comprises a transactivating CRISPR RNA (tracrRNA) molecule comprising a sequence set forth in the group consisting of SEQ ID NOs: 1261-1269, 1276-1279, and 1281-1284.

[0234] In some embodiments, the CRISPR nuclease comprises a sequence having at least 90% identity to the amino acid sequence set forth in SEQ ID NO: 51 and at least one RNA molecule is a single-guide RNA (sgRNA) molecule comprising a guide sequence portion and a sequence selected from the group consisting of SEQ ID NOs: 1256-1284.

[0235] In some embodiments, the CRISPR nuclease comprises a sequence having at least 90% identity to the amino acid sequence set forth in SEQ ID NO: 52, and at least one RNA molecule comprises a sequence selected from the group consisting of SEQ ID NOs: 1285-1298.

[0236] In some embodiments, the CRISPR nuclease comprises a sequence having at least 90% identity to the amino acid sequence set forth in SEQ ID NO: 52 and at least one RNA molecule is a CRISPR RNA (crRNA) molecule comprising a guide sequence portion and a sequence selected from the group consisting of SEQ ID NOs: 1286-1289.

[0237] In some embodiments, the composition further comprises a transactivating CRISPR RNA (tracrRNA) molecule comprising a sequence set forth in the group consisting of SEQ ID NOs: 1290-1298.

[0238] In some embodiments, the CRISPR nuclease comprises a sequence having at least 90% identity to the amino acid sequence set forth in SEQ ID NO: 52 and at least one RNA molecule is a single-guide RNA (sgRNA) molecule comprising a guide sequence portion and a sequence selected from the group consisting of SEQ ID NOs: 1285-1298.

[0239] In some embodiments, the CRISPR nuclease comprises a sequence having at least 90% identity to the amino acid sequence set forth in SEQ ID NO: 53, and at least one RNA molecule comprises a sequence selected from the group consisting of SEQ ID NOs: 1299-1312.

[0240] In some embodiments, the CRISPR nuclease comprises a sequence having at least 90% identity to the amino acid sequence set forth in SEQ ID NO: 53 and at least one RNA molecule is a CRISPR RNA (crRNA) molecule comprising a guide sequence portion and a sequence selected from the group consisting of SEQ ID NOs: 1300-1303.

[0241] In some embodiments, the composition further comprises a transactivating CRISPR RNA (tracrRNA) molecule comprising a sequence set forth in the group consisting of SEQ ID NOs: 1304-1312.

[0242] In some embodiments, the CRISPR nuclease comprises a sequence having at least 90% identity to the amino acid sequence set forth in SEQ ID NO: 53 and at least one RNA molecule is a single-guide RNA (sgRNA) molecule comprising a guide sequence portion and a sequence selected from the group consisting of SEQ ID NOs: 1299-1312.

[0243] In some embodiments, the CRISPR nuclease comprises a sequence having at least 90% identity to the amino acid sequence set forth in SEQ ID NO: 54, and at least one RNA molecule comprises a sequence selected from the group consisting of SEQ ID NOs: 1313-1342.

[0244] In some embodiments, the CRISPR nuclease comprises a sequence having at least 90% identity to the amino acid sequence set forth in SEQ ID NO: 54 and at least one RNA molecule is a CRISPR RNA (crRNA) molecule comprising a guide sequence portion and a sequence selected from the group consisting of SEQ ID NOs: 177 and 178.

[0245] In some embodiments, the composition further comprises a transactivating CRISPR RNA (tracrRNA) molecule comprising a sequence set forth in the group consisting of SEQ ID NOs: 1314-1315 and 1334-1335.

[0246] In some embodiments, the CRISPR nuclease comprises a sequence having at least 90% identity to the amino acid sequence set forth in SEQ ID NO: 54 and at least one RNA molecule is a single-guide RNA (sgRNA) molecule comprising a guide sequence portion and a sequence selected from the group consisting of SEQ ID NOs: 1316-1326, 1328-1332, and 1336-1342.

[0247] In some embodiments, the CRISPR nuclease comprises a sequence having at least 90% identity to the amino acid sequence set forth in SEQ ID NO: 55, and at least one RNA molecule comprises a sequence selected from the group consisting of SEQ ID NOs: 1343-1362.

[0248] In some embodiments, the CRISPR nuclease comprises a sequence having at least 90% identity to the amino acid sequence set forth in SEQ ID NO: 55 and at least one RNA molecule is a CRISPR RNA (crRNA) molecule comprising a guide sequence portion and a sequence selected from the group consisting of SEQ ID NOs: 1344-1347.

[0249] In some embodiments, the composition further comprises a transactivating CRISPR RNA (tracrRNA) molecule comprising a sequence set forth in the group consisting of SEQ ID NOs: 1348-1356 and 1358-1362.

[0250] In some embodiments, the CRISPR nuclease comprises a sequence having at least 90% identity to the amino acid sequence set forth in SEQ ID NO: 55 and at least one RNA molecule is a single-guide RNA (sgRNA) molecule comprising a guide sequence portion and a sequence selected from the group consisting of SEQ ID NOs: 1343-1362.

[0251] In some embodiments, the CRISPR nuclease comprises a sequence having at least 90% identity to the amino acid sequence set forth in SEQ ID NO: 56, and at least one RNA molecule comprises a sequence selected from the group consisting of SEQ ID NOs: 1363-1378.

[0252] In some embodiments, the CRISPR nuclease comprises a sequence having at least 90% identity to the amino acid sequence set forth in SEQ ID NO: 56 and at least one RNA molecule is a CRISPR RNA (crRNA) molecule comprising a guide sequence portion and a sequence selected from the group consisting of SEQ ID NOs: 1364-1367.

[0253] In some embodiments, the composition further comprises a transactivating CRISPR RNA (tracrRNA) molecule comprising a sequence set forth in the group consisting of SEQ ID NOs: 1368-1378.

[0254] In some embodiments, the CRISPR nuclease comprises a sequence having at least 90% identity to the amino acid sequence set forth in SEQ ID NO: 56 and at least one RNA molecule is a single-guide RNA (sgRNA) molecule comprising a guide sequence portion and a sequence selected from the group consisting of SEQ ID NOs: 1363-1378.

[0255] In some embodiments, the CRISPR nuclease comprises a sequence having at least 90% identity to the amino acid sequence set forth in SEQ ID NO: 57, and at least one RNA molecule comprises a sequence selected from the group consisting of SEQ ID NOs: 1379-1397.

[0256] In some embodiments, the CRISPR nuclease comprises a sequence having at least 90% identity to the amino acid sequence set forth in SEQ ID NO: 57 and at least one RNA molecule is a CRISPR RNA (crRNA) molecule comprising a guide sequence portion and a sequence selected from the group consisting of SEQ ID NOs: 1380-1383.

[0257] In some embodiments, the composition further comprises a transactivating CRISPR RNA (tracrRNA) molecule comprising a sequence set forth in the group consisting of SEQ ID NOs: 1384-1394 and 1396-1397.

[0258] In some embodiments, the CRISPR nuclease comprises a sequence having at least 90% identity to the amino acid sequence set forth in SEQ ID NO: 57 and at least one RNA molecule is a single-guide RNA (sgRNA) molecule comprising a guide sequence portion and a sequence selected from the group consisting of SEQ ID NOs: 1379-1397.

[0259] In some embodiments, the CRISPR nuclease comprises a sequence having at least 90% identity to the amino acid sequence set forth in SEQ ID NO: 58, and at least one RNA molecule comprises a sequence selected from the group consisting of SEQ ID NOs: 1398-1413.

[0260] In some embodiments, the CRISPR nuclease comprises a sequence having at least 90% identity to the amino acid sequence set forth in SEQ ID NO: 58 and at least one RNA molecule is a CRISPR RNA (crRNA) molecule comprising a guide sequence portion and a sequence selected from the group consisting of SEQ ID NOs: 1399-1402.

[0261] In some embodiments, the composition further comprises a transactivating CRISPR RNA (tracrRNA) molecule comprising a sequence set forth in the group consisting of SEQ ID NOs: 1403-1413.

[0262] In some embodiments, the CRISPR nuclease comprises a sequence having at least 90% identity to the amino acid sequence set forth in SEQ ID NO: 58 and at least one RNA molecule is a single-guide RNA (sgRNA) molecule comprising a guide sequence portion and a sequence selected from the group consisting of SEQ ID NOs: 1398-1413.

[0263] In some embodiments, the CRISPR nuclease comprises a sequence having at least 90% identity to the amino acid sequence set forth in SEQ ID NO: 59, and at least one RNA molecule comprises a sequence selected from the group consisting of SEQ ID NOs: 1414-1437.

[0264] In some embodiments, the CRISPR nuclease comprises a sequence having at least 90% identity to the amino acid sequence set forth in SEQ ID NO: 59 and at least one RNA molecule is a CRISPR RNA (crRNA) molecule comprising a guide sequence portion and a sequence selected from the group consisting of SEQ ID NOs: 1415-1418 and 1431-1434.

[0265] In some embodiments, the composition further comprises a transactivating CRISPR RNA (tracrRNA) molecule comprising a sequence set forth in the group consisting of SEQ ID NOs: 1419-1429 and 1436-1437.

[0266] In some embodiments, the CRISPR nuclease comprises a sequence having at least 90% identity to the amino acid sequence set forth in SEQ ID NO: 59 and at least one RNA molecule is a single-guide RNA (sgRNA) molecule comprising a guide sequence portion and a sequence selected from the group consisting of SEQ ID NOs: 1414-1437.

[0267] In some embodiments, the CRISPR nuclease comprises a sequence having at least 90% identity to the amino acid sequence set forth in SEQ ID NO: 60, and at least one RNA molecule comprises a sequence selected from the group consisting of SEQ ID NOs: 1438-1462.

[0268] In some embodiments, the CRISPR nuclease comprises a sequence having at least 90% identity to the amino acid sequence set forth in SEQ ID NO: 60 and at least one RNA molecule is a CRISPR RNA (crRNA) molecule comprising a guide sequence portion and a sequence selected from the group consisting of SEQ ID NOs: 1439-1442 and 1455-1458.

[0269] In some embodiments, the composition further comprises a transactivating CRISPR RNA (tracrRNA) molecule comprising a sequence set forth in the group consisting of SEQ ID NOs: 1443-1453 and 1459-1462.

[0270] In some embodiments, the CRISPR nuclease comprises a sequence having at least 90% identity to the amino acid sequence set forth in SEQ ID NO: 60 and at least one RNA molecule is a single-guide RNA (sgRNA) molecule comprising a guide sequence portion and a sequence selected from the group consisting of SEQ ID NOs: 1438-1462.

[0271] In some embodiments, the CRISPR nuclease comprises a sequence having at least 90% identity to the amino acid sequence set forth in SEQ ID NO: 61, and at least one RNA molecule comprises a sequence selected from the group consisting of SEQ ID NOs: 1463-1495.

[0272] In some embodiments, the CRISPR nuclease comprises a sequence having at least 90% identity to the amino acid sequence set forth in SEQ ID NO: 61 and at least one RNA molecule is a CRISPR RNA (crRNA) molecule comprising a guide sequence portion and a sequence selected from the group consisting of SEQ ID NOs: 1464-1467 and 1478-1481.

[0273] In some embodiments, the composition further comprises a transactivating CRISPR RNA (tracrRNA) molecule comprising a sequence set forth in the group consisting of SEQ ID NOs: 1468-1476, 1482-1490, and 1492-1495.

[0274] In some embodiments, the CRISPR nuclease comprises a sequence having at least 90% identity to the amino acid sequence set forth in SEQ ID NO: 61 and at least one RNA molecule is a single-guide RNA (sgRNA) molecule comprising a guide sequence portion and a sequence selected from the group consisting of SEQ ID NOs: 1463-1495.

[0275] In some embodiments, the CRISPR nuclease comprises a sequence having at least 90% identity to the amino acid sequence set forth in SEQ ID NO: 62, and at least one RNA molecule comprises a sequence selected from the group consisting of SEQ ID NOs: 1496-1533.

[0276] In some embodiments, the CRISPR nuclease comprises a sequence having at least 90% identity to the amino acid sequence set forth in SEQ ID NO: 62 and at least one RNA molecule is a CRISPR RNA (crRNA) molecule comprising a guide sequence portion and a sequence selected from the group consisting of SEQ ID NOs: 1497-1500 and 1515-1518.

[0277] In some embodiments, the composition further comprises a transactivating CRISPR RNA (tracrRNA) molecule comprising a sequence set forth in the group consisting of SEQ ID NOs: 1501-1513, 1519-1527, and 1529-1532.

[0278] In some embodiments, the CRISPR nuclease comprises a sequence having at least 90% identity to the amino acid sequence set forth in SEQ ID NO: 62 and at least one RNA molecule is a single-guide RNA (sgRNA) molecule comprising a guide sequence portion and a sequence selected from the group consisting of SEQ ID NOs: 1496-1533.

[0279] In some embodiments, the CRISPR nuclease comprises a sequence having at least 90% identity to the amino acid sequence set forth in SEQ ID NO: 63, and at least one RNA molecule comprises a sequence selected from the group consisting of SEQ ID NOs: 1534-1556.

[0280] In some embodiments, the CRISPR nuclease comprises a sequence having at least 90% identity to the amino acid sequence set forth in SEQ ID NO: 63 and at least one RNA molecule is a CRISPR RNA (crRNA) molecule comprising a guide sequence portion and a sequence selected from the group consisting of SEQ ID NOs: 1535-1538.

[0281] In some embodiments, the composition further comprises a transactivating CRISPR RNA (tracrRNA) molecule comprising a sequence set forth in the group consisting of SEQ ID NOs: 1539-1549, 1551-1553, and 1555-1556.

[0282] In some embodiments, the CRISPR nuclease comprises a sequence having at least 90% identity to the amino acid sequence set forth in SEQ ID NO: 63 and at least one RNA molecule is a single-guide RNA (sgRNA) molecule comprising a guide sequence portion and a sequence selected from the group consisting of SEQ ID NOs: 1534-1556.

[0283] In some embodiments, the CRISPR nuclease comprises a sequence having at least 90% identity to the amino acid sequence set forth in SEQ ID NO: 64, and at least one RNA molecule comprises a sequence selected from the group consisting of SEQ ID NOs: 1557-1572.

[0284] In some embodiments, the CRISPR nuclease comprises a sequence having at least 90% identity to the amino acid sequence set forth in SEQ ID NO: 64 and at least one RNA molecule is a CRISPR RNA (crRNA) molecule comprising a guide sequence portion and a sequence selected from the group consisting of SEQ ID NOs: 1558-1561.

[0285] In some embodiments, the composition further comprises a transactivating CRISPR RNA (tracrRNA) molecule comprising a sequence set forth in the group consisting of SEQ ID NOs: 1562-1572.

[0286] In some embodiments, the CRISPR nuclease comprises a sequence having at least 90% identity to the amino acid sequence set forth in SEQ ID NO: 64 and at least one RNA molecule is a single-guide RNA (sgRNA) molecule comprising a guide sequence portion and a sequence selected from the group consisting of SEQ ID NOs: 1557-1572.

[0287] In some embodiments, the CRISPR nuclease comprises a sequence having at least 90% identity to the amino acid sequence set forth in SEQ ID NO: 65, and at least one RNA molecule comprises a sequence selected from the group consisting of SEQ ID NOs: 1573-1617.

[0288] In some embodiments, the CRISPR nuclease comprises a sequence having at least 90% identity to the amino acid sequence set forth in SEQ ID NO: 65 and at least one RNA molecule is a CRISPR RNA (crRNA) molecule comprising a guide sequence portion and a sequence selected from the group consisting of SEQ ID NOs: 1574-1577 and 1592-1595.

[0289] In some embodiments, the composition further comprises a transactivating CRISPR RNA (tracrRNA) molecule comprising a sequence set forth in the group consisting of SEQ ID NOs: 1578-1590, 1596-1605, 1607-1612, and 1614-1617.

[0290] In some embodiments, the CRISPR nuclease comprises a sequence having at least 90% identity to the amino acid sequence set forth in SEQ ID NO: 65 and at least one RNA molecule is a single-guide RNA (sgRNA) molecule comprising a guide sequence portion and a sequence selected from the group consisting of SEQ ID NOs: 1573-1617.

[0291] In some embodiments, the CRISPR nuclease comprises a sequence having at least 90% identity to the amino acid sequence set forth in SEQ ID NO: 66, and at least one RNA molecule comprises a sequence selected from the group consisting of SEQ ID NOs: 1618-1634.

[0292] In some embodiments, the CRISPR nuclease comprises a sequence having at least 90% identity to the amino acid sequence set forth in SEQ ID NO: 66 and at least one RNA molecule is a CRISPR RNA (crRNA) molecule comprising a guide sequence portion and a sequence selected from the group consisting of SEQ ID NOs: 1619-1622.

[0293] In some embodiments, the composition further comprises a transactivating CRISPR RNA (tracrRNA) molecule comprising a sequence set forth in the group consisting of SEQ ID NOs: 1623-1631 and 1633-1634.

[0294] In some embodiments, the CRISPR nuclease comprises a sequence having at least 90% identity to the amino acid sequence set forth in SEQ ID NO: 66 and at least one RNA molecule is a single-guide RNA (sgRNA) molecule comprising a guide sequence portion and a sequence selected from the group consisting of SEQ ID NOs: 1618-1634.

[0295] In some embodiments, the CRISPR nuclease comprises a sequence having at least 90% identity to the amino acid sequence set forth in SEQ ID NO: 67, and at least one RNA molecule comprises a sequence selected from the group consisting of SEQ ID NOs: 1635-1655.

[0296] In some embodiments, the CRISPR nuclease comprises a sequence having at least 90% identity to the amino acid sequence set forth in SEQ ID NO: 67 and at least one RNA molecule is a CRISPR RNA (crRNA) molecule comprising a guide sequence portion and a sequence selected from the group consisting of SEQ ID NOs: 1636-1639.

[0297] In some embodiments, the composition further comprises a transactivating CRISPR RNA (tracrRNA) molecule comprising a sequence set forth in the group consisting of SEQ ID NOs: 1640-1652 and 1654-1655.

[0298] In some embodiments, the CRISPR nuclease comprises a sequence having at least 90% identity to the amino acid sequence set forth in SEQ ID NO: 67 and at least one RNA molecule is a single-guide RNA (sgRNA) molecule comprising a guide sequence portion and a sequence selected from the group consisting of SEQ ID NOs: 1635-1655.

[0299] In some embodiments, the CRISPR nuclease comprises a sequence having at least 90% identity to the amino acid sequence set forth in SEQ ID NO: 68, and at least one RNA molecule comprises a sequence selected from the group consisting of SEQ ID NOs: 1656-1674.

[0300] In some embodiments, the CRISPR nuclease comprises a sequence having at least 90% identity to the amino acid sequence set forth in SEQ ID NO: 68 and at least one RNA molecule is a CRISPR RNA (crRNA) molecule comprising a guide sequence portion and a sequence selected from the group consisting of SEQ ID NOs: 1657-1660.

[0301] In some embodiments, the composition further comprises a transactivating CRISPR RNA (tracrRNA) molecule comprising a sequence set forth in the group consisting of SEQ ID NOs: 1661-1671 and 1673-1674.

[0302] In some embodiments, the CRISPR nuclease comprises a sequence having at least 90% identity to the amino acid sequence set forth in SEQ ID NO: 68 and at least one RNA molecule is a single-guide RNA (sgRNA) molecule comprising a guide sequence portion and a sequence selected from the group consisting of SEQ ID NOs: 1656-1674.

[0303] In some embodiments, the CRISPR nuclease comprises a sequence having at least 90% identity to the amino acid sequence set forth in SEQ ID NO: 69, and at least one RNA molecule comprises a sequence selected from the group consisting of SEQ ID NOs: 1675-1701.

[0304] In some embodiments, the CRISPR nuclease comprises a sequence having at least 90% identity to the amino acid sequence set forth in SEQ ID NO: 69 and at least one RNA molecule is a CRISPR RNA (crRNA) molecule comprising a guide sequence portion and a sequence selected from the group consisting of SEQ ID NOs: 1676-1679.

[0305] In some embodiments, the composition further comprises a transactivating CRISPR RNA (tracrRNA) molecule comprising a sequence set forth in the group consisting of SEQ ID NOs: 1680-1692, 1694-1697, and 1699-1701.

[0306] In some embodiments, the CRISPR nuclease comprises a sequence having at least 90% identity to the amino acid sequence set forth in SEQ ID NO: 69 and at least one RNA molecule is a single-guide RNA (sgRNA) molecule comprising a guide sequence portion and a sequence selected from the group consisting of SEQ ID NOs: 1675-1701.

[0307] In some embodiments, the CRISPR nuclease comprises a sequence having at least 90% identity to the amino acid sequence set forth in SEQ ID NO: 70, and at least one RNA molecule comprises a sequence selected from the group consisting of SEQ ID NOs: 1702-1729.

[0308] In some embodiments, the CRISPR nuclease comprises a sequence having at least 90% identity to the amino acid sequence set forth in SEQ ID NO: 70 and at least one RNA molecule is a CRISPR RNA (crRNA) molecule comprising a guide sequence portion and a sequence selected from the group consisting of SEQ ID NOs: 1703-1706.

[0309] In some embodiments, the composition further comprises a transactivating CRISPR RNA (tracrRNA) molecule comprising a sequence set forth in the group consisting of SEQ ID NOs: 1707-1719, 1721-1722, 1724-1727, and 1729.

[0310] In some embodiments, the CRISPR nuclease comprises a sequence having at least 90% identity to the amino acid sequence set forth in SEQ ID NO: 70 and at least one RNA molecule is a single-guide RNA (sgRNA) molecule comprising a guide sequence portion and a sequence selected from the group consisting of SEQ ID NOs: 1702-1729.

[0311] In some embodiments, the CRISPR nuclease comprises a sequence having at least 90% identity to the amino acid sequence set forth in SEQ ID NO: 71, and at least one RNA molecule comprises a sequence selected from the group consisting of SEQ ID NOs: 1730-1747.

[0312] In some embodiments, the CRISPR nuclease comprises a sequence having at least 90% identity to the amino acid sequence set forth in SEQ ID NO: 71 and at least one RNA molecule is a CRISPR RNA (crRNA) molecule comprising a guide sequence portion and a sequence selected from the group consisting of SEQ ID NOs: 1731-1734.

[0313] In some embodiments, the composition further comprises a transactivating CRISPR RNA (tracrRNA) molecule comprising a sequence set forth in the group consisting of SEQ ID NOs: 1735-1747.

[0314] In some embodiments, the CRISPR nuclease comprises a sequence having at least 90% identity to the amino acid sequence set forth in SEQ ID NO: 71 and at least one RNA molecule is a single-guide RNA (sgRNA) molecule comprising a guide sequence portion and a sequence selected from the group consisting of SEQ ID NOs: 1730-1747.

[0315] In some embodiments, the CRISPR nuclease comprises a sequence having at least 90% identity to the amino acid sequence set forth in SEQ ID NO: 72, and at least one RNA molecule comprises a sequence selected from the group consisting of SEQ ID NOs: 1748-1774.

[0316] In some embodiments, the CRISPR nuclease comprises a sequence having at least 90% identity to the amino acid sequence set forth in SEQ ID NO: 72 and at least one RNA molecule is a CRISPR RNA (crRNA) molecule comprising a guide sequence portion and a sequence selected from the group consisting of SEQ ID NOs: 1749-1752.

[0317] In some embodiments, the composition further comprises a transactivating CRISPR RNA (tracrRNA) molecule comprising a sequence set forth in the group consisting of SEQ ID NOs: 1753-1763, 1765-1770, and 1772-1774.

[0318] In some embodiments, the CRISPR nuclease comprises a sequence having at least 90% identity to the amino acid sequence set forth in SEQ ID NO: 72 and at least one RNA molecule is a single-guide RNA (sgRNA) molecule comprising a guide sequence portion and a sequence selected from the group consisting of SEQ ID NOs: 1748-1774.

[0319] In some embodiments, the CRISPR nuclease comprises a sequence having at least 90% identity to the amino acid sequence set forth in SEQ ID NO: 73, and at least one RNA molecule comprises a sequence selected from the group consisting of SEQ ID NOs: 1775-1801.

[0320] In some embodiments, the CRISPR nuclease comprises a sequence having at least 90% identity to the amino acid sequence set forth in SEQ ID NO: 73 and at least one RNA molecule is a CRISPR RNA (crRNA) molecule comprising a guide sequence portion and a sequence selected from the group consisting of SEQ ID NOs: 1776-1779 and 1792-1795.

[0321] In some embodiments, the composition further comprises a transactivating CRISPR RNA (tracrRNA) molecule comprising a sequence set forth in the group consisting of SEQ ID NOs: 1780-1790 and 1796-1801.

[0322] In some embodiments, the CRISPR nuclease comprises a sequence having at least 90% identity to the amino acid sequence set forth in SEQ ID NO: 73 and at least one RNA molecule is a single-guide RNA (sgRNA) molecule comprising a guide sequence portion and a sequence selected from the group consisting of SEQ ID NOs: 1775-1801.

[0323] In some embodiments, the CRISPR nuclease comprises a sequence having at least 90% identity to the amino acid sequence set forth in SEQ ID NO: 74, and at least one RNA molecule comprises a sequence selected from the group consisting of SEQ ID NOs: 1802-1828.

[0324] In some embodiments, the CRISPR nuclease comprises a sequence having at least 90% identity to the amino acid sequence set forth in SEQ ID NO: 74 and at least one RNA molecule is a CRISPR RNA (crRNA) molecule comprising a guide sequence portion and a sequence selected from the group consisting of SEQ ID NOs: 1803-1806.

[0325] In some embodiments, the composition further comprises a transactivating CRISPR RNA (tracrRNA) molecule comprising a sequence set forth in the group consisting of SEQ ID NOs: 1807-1817, 1819-1820, 1822-1825, and 1827-1828.

[0326] In some embodiments, the CRISPR nuclease comprises a sequence having at least 90% identity to the amino acid sequence set forth in SEQ ID NO: 74 and at least one RNA molecule is a single-guide RNA (sgRNA) molecule comprising a guide sequence portion and a sequence selected from the group consisting of SEQ ID NOs: 1802-1828.

[0327] In some embodiments, the CRISPR nuclease comprises a sequence having at least 90% identity to the amino acid sequence set forth in SEQ ID NO: 75, and at least one RNA molecule comprises a sequence selected from the group consisting of SEQ ID NOs: 1829-1844.

[0328] In some embodiments, the CRISPR nuclease comprises a sequence having at least 90% identity to the amino acid sequence set forth in SEQ ID NO: 75 and at least one RNA molecule is a CRISPR RNA (crRNA) molecule comprising a guide sequence portion and a sequence selected from the group consisting of SEQ ID NOs: 1830-1833.

[0329] In some embodiments, the composition further comprises a transactivating CRISPR RNA (tracrRNA) molecule comprising a sequence set forth in the group consisting of SEQ ID NOs: 1834-1844.

[0330] In some embodiments, the CRISPR nuclease comprises a sequence having at least 90% identity to the amino acid sequence set forth in SEQ ID NO: 75 and at least one RNA molecule is a single-guide RNA (sgRNA) molecule comprising a guide sequence portion and a sequence selected from the group consisting of SEQ ID NOs: 1829-1844.

[0331] In some embodiments, the CRISPR nuclease comprises a sequence having at least 90% identity to the amino acid sequence set forth in SEQ ID NO: 76, and at least one RNA molecule comprises a sequence selected from the group consisting of SEQ ID NOs: 1845-1870.

[0332] In some embodiments, the CRISPR nuclease comprises a sequence having at least 90% identity to the amino acid sequence set forth in SEQ ID NO: 76 and at least one RNA molecule is a CRISPR RNA (crRNA) molecule comprising a guide sequence portion and a sequence selected from the group consisting of SEQ ID NOs: 1846-1849.

[0333] In some embodiments, the composition further comprises a transactivating CRISPR RNA (tracrRNA) molecule comprising a sequence set forth in the group consisting of SEQ ID NOs: 1850-1860, 1862-1863, 1685-1868, and 1870.

[0334] In some embodiments, the CRISPR nuclease comprises a sequence having at least 90% identity to the amino acid sequence set forth in SEQ ID NO: 76 and at least one RNA molecule is a single-guide RNA (sgRNA) molecule comprising a guide sequence portion and a sequence selected from the group consisting of SEQ ID NOs: 1845-1870.

[0335] In some embodiments, the CRISPR nuclease comprises a sequence having at least 90% identity to the amino acid sequence set forth in SEQ ID NO: 77, and at least one RNA molecule comprises a sequence selected from the group consisting of SEQ ID NOs: 1871-1895.

[0336] In some embodiments, the CRISPR nuclease comprises a sequence having at least 90% identity to the amino acid sequence set forth in SEQ ID NO: 77 and at least one RNA molecule is a CRISPR RNA (crRNA) molecule comprising a guide sequence portion and a sequence selected from the group consisting of SEQ ID NOs: 1872-1875 and 1888-1891.

[0337] In some embodiments, the composition further comprises a transactivating CRISPR RNA (tracrRNA) molecule comprising a sequence set forth in the group consisting of SEQ ID NOs: 1876-1886 and 1892-1895.

[0338] In some embodiments, the CRISPR nuclease comprises a sequence having at least 90% identity to the amino acid sequence set forth in SEQ ID NO: 77 and at least one RNA molecule is a single-guide RNA (sgRNA) molecule comprising a guide sequence portion and a sequence selected from the group consisting of SEQ ID NOs: 1871-1895.

[0339] In some embodiments, the CRISPR nuclease comprises a sequence having at least 90% identity to the amino acid sequence set forth in SEQ ID NO: 78, and at least one RNA molecule comprises a sequence selected from the group consisting of SEQ ID NOs: 1896-1911.

[0340] In some embodiments, the CRISPR nuclease comprises a sequence having at least 90% identity to the amino acid sequence set forth in SEQ ID NO: 78 and at least one RNA molecule is a CRISPR RNA (crRNA) molecule comprising a guide sequence portion and a sequence selected from the group consisting of SEQ ID NOs: 1897-1900.

[0341] In some embodiments, the composition further comprises a transactivating CRISPR RNA (tracrRNA) molecule comprising a sequence set forth in the group consisting of SEQ ID NOs: 1901-1911.

[0342] In some embodiments, the CRISPR nuclease comprises a sequence having at least 90% identity to the amino acid sequence set forth in SEQ ID NO: 78 and at least one RNA molecule is a single-guide RNA (sgRNA) molecule comprising a guide sequence portion and a sequence selected from the group consisting of SEQ ID NOs: 1896-1911.

[0343] In some embodiments, the CRISPR nuclease comprises a sequence having at least 90% identity to the amino acid sequence set forth in SEQ ID NO: 79, and at least one RNA molecule comprises a sequence selected from the group consisting of SEQ ID NOs: 1912-1930.

[0344] In some embodiments, the CRISPR nuclease comprises a sequence having at least 90% identity to the amino acid sequence set forth in SEQ ID NO: 79 and at least one RNA molecule is a CRISPR RNA (crRNA) molecule comprising a guide sequence portion and a sequence selected from the group consisting of SEQ ID NOs: 1913-1916.

[0345] In some embodiments, the composition further comprises a transactivating CRISPR RNA (tracrRNA) molecule comprising a sequence set forth in the group consisting of SEQ ID NOs: 1917-1927 and 1929-1930.

[0346] In some embodiments, the CRISPR nuclease comprises a sequence having at least 90% identity to the amino acid sequence set forth in SEQ ID NO: 79 and at least one RNA molecule is a single-guide RNA (sgRNA) molecule comprising a guide sequence portion and a sequence selected from the group consisting of SEQ ID NOs: 1912-1930.

[0347] In some embodiments, the CRISPR nuclease comprises a sequence having at least 90% identity to the amino acid sequence set forth in SEQ ID NO: 80, and at least one RNA molecule comprises a sequence selected from the group consisting of SEQ ID NOs: 1931-1942.

[0348] In some embodiments, the CRISPR nuclease comprises a sequence having at least 90% identity to the amino acid sequence set forth in SEQ ID NO: 80 and at least one RNA molecule is a CRISPR RNA (crRNA) molecule comprising a guide sequence portion and a sequence selected from the group consisting of SEQ ID NOs: 1932-1934.

[0349] In some embodiments, the composition further comprises a transactivating CRISPR RNA (tracrRNA) molecule comprising a sequence set forth in the group consisting of SEQ ID NOs: 1935-1942.

[0350] In some embodiments, the CRISPR nuclease comprises a sequence having at least 90% identity to the amino acid sequence set forth in SEQ ID NO: 80 and at least one RNA molecule is a single-guide RNA (sgRNA) molecule comprising a guide sequence portion and a sequence selected from the group consisting of SEQ ID NOs: 1931-1942.

[0351] In some embodiments, the CRISPR nuclease comprises a sequence having at least 90% identity to the amino acid sequence set forth in SEQ ID NO: 81, and at least one RNA molecule comprises a sequence selected from the group consisting of SEQ ID NOs: 1943-1971.

[0352] In some embodiments, the CRISPR nuclease comprises a sequence having at least 90% identity to the amino acid sequence set forth in SEQ ID NO: 81 and at least one RNA molecule is a CRISPR RNA (crRNA) molecule comprising a guide sequence portion and a sequence selected from the group consisting of SEQ ID NOs: 1944-1947 and 1960-1963.

[0353] In some embodiments, the composition further comprises a transactivating CRISPR RNA (tracrRNA) molecule comprising a sequence set forth in the group consisting of SEQ ID NOs: 1948-1958 and 1964-1971.

[0354] In some embodiments, the CRISPR nuclease comprises a sequence having at least 90% identity to the amino acid sequence set forth in SEQ ID NO: 81 and at least one RNA molecule is a single-guide RNA (sgRNA) molecule comprising a guide sequence portion and a sequence selected from the group consisting of SEQ ID NOs: 1943-1971.

[0355] In some embodiments, the CRISPR nuclease comprises a sequence having at least 90% identity to the amino acid sequence set forth in SEQ ID NO: 82, and at least one RNA molecule comprises a sequence selected from the group consisting of SEQ ID NOs: 1972-1999.

[0356] In some embodiments, the CRISPR nuclease comprises a sequence having at least 90% identity to the amino acid sequence set forth in SEQ ID NO: 82 and at least one RNA molecule is a CRISPR RNA (crRNA) molecule comprising a guide sequence portion and a sequence selected from the group consisting of SEQ ID NOs: 1973-1976.

[0357] In some embodiments, the composition further comprises a transactivating CRISPR RNA (tracrRNA) molecule comprising a sequence set forth in the group consisting of SEQ ID NOs: 1977-1989, 1991-1995, and 1997-1998.

[0358] In some embodiments, the CRISPR nuclease comprises a sequence having at least 90% identity to the amino acid sequence set forth in SEQ ID NO: 82 and at least one RNA molecule is a single-guide RNA (sgRNA) molecule comprising a guide sequence portion and a sequence selected from the group consisting of SEQ ID NOs: 1972-1999.

[0359] In some embodiments, the CRISPR nuclease comprises a sequence having at least 90% identity to the amino acid sequence set forth in SEQ ID NO: 83, and at least one RNA molecule comprises a sequence selected from the group consisting of SEQ ID NOs: 2000-2024.

[0360] In some embodiments, the CRISPR nuclease comprises a sequence having at least 90% identity to the amino acid sequence set forth in SEQ ID NO: 83 and at least one RNA molecule is a CRISPR RNA (crRNA) molecule comprising a guide sequence portion and a sequence selected from the group consisting of SEQ ID NOs: 2001-2004.

[0361] In some embodiments, the composition further comprises a transactivating CRISPR RNA (tracrRNA) molecule comprising a sequence set forth in the group consisting of SEQ ID NOs: 2005-2017, 2019-2020, and 2022-2023.

[0362] In some embodiments, the CRISPR nuclease comprises a sequence having at least 90% identity to the amino acid sequence set forth in SEQ ID NO: 83 and at least one RNA molecule is a single-guide RNA (sgRNA) molecule comprising a guide sequence portion and a sequence selected from the group consisting of SEQ ID NOs: 2000-2024.

[0363] In some embodiments, the CRISPR nuclease comprises a sequence having at least 90% identity to the amino acid sequence set forth in SEQ ID NO: 84, and at least one RNA molecule comprises a sequence selected from the group consisting of SEQ ID NOs: 2025-2045.

[0364] In some embodiments, the CRISPR nuclease comprises a sequence having at least 90% identity to the amino acid sequence set forth in SEQ ID NO: 84 and at least one RNA molecule is a CRISPR RNA (crRNA) molecule comprising a guide sequence portion and a sequence selected from the group consisting of SEQ ID NOs: 2026-2029.

[0365] In some embodiments, the composition further comprises a transactivating CRISPR RNA (tracrRNA) molecule comprising a sequence set forth in the group consisting of SEQ ID NOs: 2030-2042 and 2044-2045.

[0366] In some embodiments, the CRISPR nuclease comprises a sequence having at least 90% identity to the amino acid sequence set forth in SEQ ID NO: 84 and at least one RNA molecule is a single-guide RNA (sgRNA) molecule comprising a guide sequence portion and a sequence selected from the group consisting of SEQ ID NOs: 2025-2045.

[0367] In some embodiments, the CRISPR nuclease comprises a sequence having at least 90% identity to the amino acid sequence set forth in SEQ ID NO: 85, and at least one RNA molecule comprises a sequence selected from the group consisting of SEQ ID NOs: 2046-2063.

[0368] In some embodiments, the CRISPR nuclease comprises a sequence having at least 90% identity to the amino acid sequence set forth in SEQ ID NO: 85 and at least one RNA molecule is a CRISPR RNA (crRNA) molecule comprising a guide sequence portion and a sequence selected from the group consisting of SEQ ID NOs: 2047-2050.

[0369] In some embodiments, the composition further comprises a transactivating CRISPR RNA (tracrRNA) molecule comprising a sequence set forth in the group consisting of SEQ ID NOs: 2051-2063.

[0370] In some embodiments, the CRISPR nuclease comprises a sequence having at least 90% identity to the amino acid sequence set forth in SEQ ID NO: 85 and at least one RNA molecule is a single-guide RNA (sgRNA) molecule comprising a guide sequence portion and a sequence selected from the group consisting of SEQ ID NOs: 2046-2063.

[0371] In some embodiments, the CRISPR nuclease comprises a sequence having at least 90% identity to the amino acid sequence set forth in SEQ ID NO: 86, and at least one RNA molecule comprises a sequence selected from the group consisting of SEQ ID NOs: 2064-2088.

[0372] In some embodiments, the CRISPR nuclease comprises a sequence having at least 90% identity to the amino acid sequence set forth in SEQ ID NO: 86 and at least one RNA molecule is a CRISPR RNA (crRNA) molecule comprising a guide sequence portion and a sequence selected from the group consisting of SEQ ID NOs: 2065-2068.

[0373] In some embodiments, the composition further comprises a transactivating CRISPR RNA (tracrRNA) molecule comprising a sequence set forth in the group consisting of SEQ ID NOs: 2069-2081, 2083-2084, and 2086-2087.

[0374] In some embodiments, the CRISPR nuclease comprises a sequence having at least 90% identity to the amino acid sequence set forth in SEQ ID NO: 86 and at least one RNA molecule is a single-guide RNA (sgRNA) molecule comprising a guide sequence portion and a sequence selected from the group consisting of SEQ ID NOs: 2064-2088.

[0375] In some embodiments, the CRISPR nuclease comprises a sequence having at least 90% identity to the amino acid sequence set forth in SEQ ID NO: 87, and at least one RNA molecule comprises a sequence selected from the group consisting of SEQ ID NOs: 2089-2109.

[0376] In some embodiments, the CRISPR nuclease comprises a sequence having at least 90% identity to the amino acid sequence set forth in SEQ ID NO: 87 and at least one RNA molecule is a CRISPR RNA (crRNA) molecule comprising a guide sequence portion and a sequence selected from the group consisting of SEQ ID NOs: 2090-2093.

[0377] In some embodiments, the composition further comprises a transactivating CRISPR RNA (tracrRNA) molecule comprising a sequence set forth in the group consisting of SEQ ID NOs: 2094-2106 and 2108-2109.

[0378] In some embodiments, the CRISPR nuclease comprises a sequence having at least 90% identity to the amino acid sequence set forth in SEQ ID NO: 87 and at least one RNA molecule is a single-guide RNA (sgRNA) molecule comprising a guide sequence portion and a sequence selected from the group consisting of SEQ ID NOs: 2089-2109.

[0379] In some embodiments, the CRISPR nuclease comprises a sequence having at least 90% identity to the amino acid sequence set forth in SEQ ID NO: 88, and at least one RNA molecule comprises a sequence selected from the group consisting of SEQ ID NOs: 2110-2131.

[0380] In some embodiments, the CRISPR nuclease comprises a sequence having at least 90% identity to the amino acid sequence set forth in SEQ ID NO: 88 and at least one RNA molecule is a CRISPR RNA (crRNA) molecule comprising a guide sequence portion and a sequence selected from the group consisting of SEQ ID NOs: 2111-2114.

[0381] In some embodiments, the composition further comprises a transactivating CRISPR RNA (tracrRNA) molecule comprising a sequence set forth in the group consisting of SEQ ID NOs: 2115-2127, 2129, and 2131.

[0382] In some embodiments, the CRISPR nuclease comprises a sequence having at least 90% identity to the amino acid sequence set forth in SEQ ID NO: 88 and at least one RNA molecule is a single-guide RNA (sgRNA) molecule comprising a guide sequence portion and a sequence selected from the group consisting of SEQ ID NOs: 2110-2131.

[0383] In some embodiments, the CRISPR nuclease comprises a sequence having at least 90% identity to the amino acid sequence set forth in SEQ ID NO: 89, and at least one RNA molecule comprises a sequence selected from the group consisting of SEQ ID NOs: 2132-2156.

[0384] In some embodiments, the CRISPR nuclease comprises a sequence having at least 90% identity to the amino acid sequence set forth in SEQ ID NO: 89 and at least one RNA molecule is a CRISPR RNA (crRNA) molecule comprising a guide sequence portion and a sequence selected from the group consisting of SEQ ID NOs: 2133-2136.

[0385] In some embodiments, the composition further comprises a transactivating CRISPR RNA (tracrRNA) molecule comprising a sequence set forth in the group consisting of SEQ ID NOs: 2137-2149, 2151-2152, and 2154-2155.

[0386] In some embodiments, the CRISPR nuclease comprises a sequence having at least 90% identity to the amino acid sequence set forth in SEQ ID NO: 89 and at least one RNA molecule is a single-guide RNA (sgRNA) molecule comprising a guide sequence portion and a sequence selected from the group consisting of SEQ ID NOs: 2132-2156.

[0387] In some embodiments, the CRISPR nuclease comprises a sequence having at least 90% identity to the amino acid sequence set forth in SEQ ID NO: 90, and at least one RNA molecule comprises a sequence selected from the group consisting of SEQ ID NOs: 2157-2178.

[0388] In some embodiments, the CRISPR nuclease comprises a sequence having at least 90% identity to the amino acid sequence set forth in SEQ ID NO: 90 and at least one RNA molecule is a CRISPR RNA (crRNA) molecule comprising a guide sequence portion and a sequence selected from the group consisting of SEQ ID NOs: 2158-2161.

[0389] In some embodiments, the composition further comprises a transactivating CRISPR RNA (tracrRNA) molecule comprising a sequence set forth in the group consisting of SEQ ID NOs: 2162-2174 and 2176-2178.

[0390] In some embodiments, the CRISPR nuclease comprises a sequence having at least 90% identity to the amino acid sequence set forth in SEQ ID NO: 90 and at least one RNA molecule is a single-guide RNA (sgRNA) molecule comprising a guide sequence portion and a sequence selected from the group consisting of SEQ ID NOs: 2157-2178.

[0391] In some embodiments, the CRISPR nuclease comprises a sequence having at least 90% identity to the amino acid sequence set forth in SEQ ID NO: 91, and at least one RNA molecule comprises a sequence selected from the group consisting of SEQ ID NOs: 2179-2203.

[0392] In some embodiments, the CRISPR nuclease comprises a sequence having at least 90% identity to the amino acid sequence set forth in SEQ ID NO: 91 and at least one RNA molecule is a CRISPR RNA (crRNA) molecule comprising a guide sequence portion and a sequence selected from the group consisting of SEQ ID NOs: 2180-2183.

[0393] In some embodiments, the composition further comprises a transactivating CRISPR RNA (tracrRNA) molecule comprising a sequence set forth in the group consisting of SEQ ID NOs: 2184-2192, 2194-2196, and 2198-2203.

[0394] In some embodiments, the CRISPR nuclease comprises a sequence having at least 90% identity to the amino acid sequence set forth in SEQ ID NO: 91 and at least one RNA molecule is a single-guide RNA (sgRNA) molecule comprising a guide sequence portion and a sequence selected from the group consisting of SEQ ID NOs: 2179-2203.

[0395] In some embodiments, the CRISPR nuclease comprises a sequence having at least 90% identity to the amino acid sequence set forth in SEQ ID NO: 92, and at least one RNA molecule comprises a sequence selected from the group consisting of SEQ ID NOs: 2204-2230.

[0396] In some embodiments, the CRISPR nuclease comprises a sequence having at least 90% identity to the amino acid sequence set forth in SEQ ID NO: 92 and at least one RNA molecule is a CRISPR RNA (crRNA) molecule comprising a guide sequence portion and a sequence selected from the group consisting of SEQ ID NOs: 2205-2208.

[0397] In some embodiments, the composition further comprises a transactivating CRISPR RNA (tracrRNA) molecule comprising a sequence set forth in the group consisting of SEQ ID NOs: 2209-2221, 2223-2226, and 2228-2230.

[0398] In some embodiments, the CRISPR nuclease comprises a sequence having at least 90% identity to the amino acid sequence set forth in SEQ ID NO: 92 and at least one RNA molecule is a single-guide RNA (sgRNA) molecule comprising a guide sequence portion and a sequence selected from the group consisting of SEQ ID NOs: 2204-2230.

[0399] In some embodiments, the CRISPR nuclease comprises a sequence having at least 90% identity to the amino acid sequence set forth in SEQ ID NO: 93, and at least one RNA molecule comprises a sequence selected from the group consisting of SEQ ID NOs: 2231-2256.

[0400] In some embodiments, the CRISPR nuclease comprises a sequence having at least 90% identity to the amino acid sequence set forth in SEQ ID NO: 93 and at least one RNA molecule is a CRISPR RNA (crRNA) molecule comprising a guide sequence portion and a sequence selected from the group consisting of SEQ ID NOs: 2232-2235.

[0401] In some embodiments, the composition further comprises a transactivating CRISPR RNA (tracrRNA) molecule comprising a sequence set forth in the group consisting of SEQ ID NOs: 2236-2248, 2250-2252, and 2254-2255.

[0402] In some embodiments, the CRISPR nuclease comprises a sequence having at least 90% identity to the amino acid sequence set forth in SEQ ID NO: 93 and at least one RNA molecule is a single-guide RNA (sgRNA) molecule comprising a guide sequence portion and a sequence selected from the group consisting of SEQ ID NOs: 2231-2256.

[0403] In some embodiments, the CRISPR nuclease comprises a sequence having at least 90% identity to the amino acid sequence set forth in SEQ ID NO: 94, and at least one RNA molecule comprises a sequence selected from the group consisting of SEQ ID NOs: 2257-2277.

[0404] In some embodiments, the CRISPR nuclease comprises a sequence having at least 90% identity to the amino acid sequence set forth in SEQ ID NO: 94 and at least one RNA molecule is a CRISPR RNA (crRNA) molecule comprising a guide sequence portion and a sequence selected from the group consisting of SEQ ID NOs: 2258-2261.

[0405] In some embodiments, the composition further comprises a transactivating CRISPR RNA (tracrRNA) molecule comprising a sequence set forth in the group consisting of SEQ ID NOs: 2262-2274 and 2276-2277.

[0406] In some embodiments, the CRISPR nuclease comprises a sequence having at least 90% identity to the amino acid sequence set forth in SEQ ID NO: 94 and at least one RNA molecule is a single-guide RNA (sgRNA) molecule comprising a guide sequence portion and a sequence selected from the group consisting of SEQ ID NOs: 2257-2277.

[0407] In some embodiments, the CRISPR nuclease comprises a sequence having at least 90% identity to the amino acid sequence set forth in SEQ ID NO: 95, and at least one RNA molecule comprises a sequence selected from the group consisting of SEQ ID NOs: 2278-2304.

[0408] In some embodiments, the CRISPR nuclease comprises a sequence having at least 90% identity to the amino acid sequence set forth in SEQ ID NO: 95 and at least one RNA molecule is a CRISPR RNA (crRNA) molecule comprising a guide sequence portion and a sequence selected from the group consisting of SEQ ID NOs: 2279-2282.

[0409] In some embodiments, the composition further comprises a transactivating CRISPR RNA (tracrRNA) molecule comprising a sequence set forth in the group consisting of SEQ ID NOs: 2283-2295, 2297-2299, and 2301-2304.

[0410] In some embodiments, the CRISPR nuclease comprises a sequence having at least 90% identity to the amino acid sequence set forth in SEQ ID NO: 95 and at least one RNA molecule is a single-guide RNA (sgRNA) molecule comprising a guide sequence portion and a sequence selected from the group consisting of SEQ ID NOs: 2278-2304.

[0411] In some embodiments, the CRISPR nuclease comprises a sequence having at least 90% identity to the amino acid sequence set forth in SEQ ID NO: 96, and at least one RNA molecule comprises a sequence selected from the group consisting of SEQ ID NOs: 2305-2333.

[0412] In some embodiments, the CRISPR nuclease comprises a sequence having at least 90% identity to the amino acid sequence set forth in SEQ ID NO: 96 and at least one RNA molecule is a CRISPR RNA (crRNA) molecule comprising a guide sequence portion and a sequence selected from the group consisting of SEQ ID NOs: 2306-2309.

[0413] In some embodiments, the composition further comprises a transactivating CRISPR RNA (tracrRNA) molecule comprising a sequence set forth in the group consisting of SEQ ID NOs: 2310-2320, 2322-2325, 2327-2329, and 2331-2333.

[0414] In some embodiments, the CRISPR nuclease comprises a sequence having at least 90% identity to the amino acid sequence set forth in SEQ ID NO: 96 and at least one RNA molecule is a single-guide RNA (sgRNA) molecule comprising a guide sequence portion and a sequence selected from the group consisting of SEQ ID NOs: 2305-2333.

[0415] In some embodiments, the CRISPR nuclease comprises a sequence having at least 90% identity to the amino acid sequence set forth in SEQ ID NO: 97, and at least one RNA molecule comprises a sequence selected from the group consisting of SEQ ID NOs: 2334-2349.

[0416] In some embodiments, the CRISPR nuclease comprises a sequence having at least 90% identity to the amino acid sequence set forth in SEQ ID NO: 97 and at least one RNA molecule is a CRISPR RNA (crRNA) molecule comprising a guide sequence portion and a sequence selected from the group consisting of SEQ ID NOs: 2335-2338.

[0417] In some embodiments, the composition further comprises a transactivating CRISPR RNA (tracrRNA) molecule comprising a sequence set forth in the group consisting of SEQ ID NOs: 2339-2349.

[0418] In some embodiments, the CRISPR nuclease comprises a sequence having at least 90% identity to the amino acid sequence set forth in SEQ ID NO: 97 and at least one RNA molecule is a single-guide RNA (sgRNA) molecule comprising a guide sequence portion and a sequence selected from the group consisting of SEQ ID NOs: 2334-2349.

[0419] In some embodiments, the CRISPR nuclease comprises a sequence having at least 90% identity to the amino acid sequence set forth in SEQ ID NO: 98, and at least one RNA molecule comprises a sequence selected from the group consisting of SEQ ID NOs: 2350-2368.

[0420] In some embodiments, the CRISPR nuclease comprises a sequence having at least 90% identity to the amino acid sequence set forth in SEQ ID NO: 98 and at least one RNA molecule is a CRISPR RNA (crRNA) molecule comprising a guide sequence portion and a sequence selected from the group consisting of SEQ ID NOs: 2351-2354.

[0421] In some embodiments, the composition further comprises a transactivating CRISPR RNA (tracrRNA) molecule comprising a sequence set forth in the group consisting of SEQ ID NOs: 2355-2365 and 2367-2368.

[0422] In some embodiments, the CRISPR nuclease comprises a sequence having at least 90% identity to the amino acid sequence set forth in SEQ ID NO: 98 and at least one RNA molecule is a single-guide RNA (sgRNA) molecule comprising a guide sequence portion and a sequence selected from the group consisting of SEQ ID NOs: 2350-2368.

[0423] In some embodiments, the CRISPR nuclease comprises a sequence having at least 90% identity to the amino acid sequence set forth in SEQ ID NO: 99, and at least one RNA molecule comprises a sequence selected from the group consisting of SEQ ID NOs: 2369-2390.

[0424] In some embodiments, the CRISPR nuclease comprises a sequence having at least 90% identity to the amino acid sequence set forth in SEQ ID NO: 99 and at least one RNA molecule is a CRISPR RNA (crRNA) molecule comprising a guide sequence portion and a sequence selected from the group consisting of SEQ ID NOs: 2370-2373.

[0425] In some embodiments, the composition further comprises a transactivating CRISPR RNA (tracrRNA) molecule comprising a sequence set forth in the group consisting of SEQ ID NOs: 2374-2384 and 2386-2390.

[0426] In some embodiments, the CRISPR nuclease comprises a sequence having at least 90% identity to the amino acid sequence set forth in SEQ ID NO: 99 and at least one RNA molecule is a single-guide RNA (sgRNA) molecule comprising a guide sequence portion and a sequence selected from the group consisting of SEQ ID NOs: 2369-2390.

[0427] In some embodiments, the CRISPR nuclease comprises a sequence having at least 90% identity to the amino acid sequence set forth in SEQ ID NO: 100, and at least one RNA molecule comprises a sequence selected from the group consisting of SEQ ID NOs: 2391-2411.

[0428] In some embodiments, the CRISPR nuclease comprises a sequence having at least 90% identity to the amino acid sequence set forth in SEQ ID NO: 100 and at least one RNA molecule is a CRISPR RNA (crRNA) molecule comprising a guide sequence portion and a sequence selected from the group consisting of SEQ ID NOs: 2392-2395.

[0429] In some embodiments, the composition further comprises a transactivating CRISPR RNA (tracrRNA) molecule comprising a sequence set forth in the group consisting of SEQ ID NOs: 2396-2408 and 2410-2411.

[0430] In some embodiments, the CRISPR nuclease comprises a sequence having at least 90% identity to the amino acid sequence set forth in SEQ ID NO: 100 and at least one RNA molecule is a single-guide RNA (sgRNA) molecule comprising a guide sequence portion and a sequence selected from the group consisting of SEQ ID NOs: 2391-2411.

[0431] In some embodiments, the CRISPR nuclease comprises a sequence having at least 90% identity to the amino acid sequence set forth in SEQ ID NO: 101, and at least one RNA molecule comprises a sequence selected from the group consisting of SEQ ID NOs: 2412-2436.

[0432] In some embodiments, the CRISPR nuclease comprises a sequence having at least 90% identity to the amino acid sequence set forth in SEQ ID NO: 101 and at least one RNA molecule is a CRISPR RNA (crRNA) molecule comprising a guide sequence portion and a sequence selected from the group consisting of SEQ ID NOs: 2413-2416 and 2429-2432.

[0433] In some embodiments, the composition further comprises a transactivating CRISPR RNA (tracrRNA) molecule comprising a sequence set forth in the group consisting of SEQ ID NOs: 2417-2427 and 2433-2436.

[0434] In some embodiments, the CRISPR nuclease comprises a sequence having at least 90% identity to the amino acid sequence set forth in SEQ ID NO: 101 and at least one RNA molecule is a single-guide RNA (sgRNA) molecule comprising a guide sequence portion and a sequence selected from the group consisting of SEQ ID NOs: 2412-2436.

[0435] In some embodiments, the CRISPR nuclease comprises a sequence having at least 90% identity to the amino acid sequence set forth in SEQ ID NO: 102, and at least one RNA molecule comprises a sequence selected from the group consisting of SEQ ID NOs: 2437-2452.

[0436] In some embodiments, the CRISPR nuclease comprises a sequence having at least 90% identity to the amino acid sequence set forth in SEQ ID NO: 102 and at least one RNA molecule is a CRISPR RNA (crRNA) molecule comprising a guide sequence portion and a sequence selected from the group consisting of SEQ ID NOs: 2438-2441.

[0437] In some embodiments, the composition further comprises a transactivating CRISPR RNA (tracrRNA) molecule comprising a sequence set forth in the group consisting of SEQ ID NOs: 2442-2452.

[0438] In some embodiments, the CRISPR nuclease comprises a sequence having at least 90% identity to the amino acid sequence set forth in SEQ ID NO: 102 and at least one RNA molecule is a single-guide RNA (sgRNA) molecule comprising a guide sequence portion and a sequence selected from the group consisting of SEQ ID NOs: 2437-2452.

[0439] In some embodiments, the CRISPR nuclease comprises a sequence having at least 90% identity to the amino acid sequence set forth in SEQ ID NO: 103, and at least one RNA molecule comprises a sequence selected from the group consisting of SEQ ID NOs: 24523-2468.

[0440] In some embodiments, the CRISPR nuclease comprises a sequence having at least 90% identity to the amino acid sequence set forth in SEQ ID NO: 103 and at least one RNA molecule is a CRISPR RNA (crRNA) molecule comprising a guide sequence portion and a sequence selected from the group consisting of SEQ ID NOs: 2454-2457.

[0441] In some embodiments, the composition further comprises a transactivating CRISPR RNA (tracrRNA) molecule comprising a sequence set forth in the group consisting of SEQ ID NOs: 2458-2468.

[0442] In some embodiments, the CRISPR nuclease comprises a sequence having at least 90% identity to the amino acid sequence set forth in SEQ ID NO: 103 and at least one RNA molecule is a single-guide RNA (sgRNA) molecule comprising a guide sequence portion and a sequence selected from the group consisting of SEQ ID NOs: 24523-2468.

[0443] In some embodiments, the CRISPR nuclease comprises a sequence having at least 90% identity to the amino acid sequence set forth in SEQ ID NO: 104, and at least one RNA molecule comprises a sequence selected from the group consisting of SEQ ID NOs: 2469-2484.

[0444] In some embodiments, the CRISPR nuclease comprises a sequence having at least 90% identity to the amino acid sequence set forth in SEQ ID NO: 104 and at least one RNA molecule is a CRISPR RNA (crRNA) molecule comprising a guide sequence portion and a sequence selected from the group consisting of SEQ ID NOs: 2470-2473.

[0445] In some embodiments, the composition further comprises a transactivating CRISPR RNA (tracrRNA) molecule comprising a sequence set forth in the group consisting of SEQ ID NOs: 2474-2484.

[0446] In some embodiments, the CRISPR nuclease comprises a sequence having at least 90% identity to the amino acid sequence set forth in SEQ ID NO: 104 and at least one RNA molecule is a single-guide RNA (sgRNA) molecule comprising a guide sequence portion and a sequence selected from the group consisting of SEQ ID NOs: 2469-2484.

[0447] In some embodiments, the CRISPR nuclease comprises a sequence having at least 90% identity to the amino acid sequence set forth in SEQ ID NO: 105, and at least one RNA molecule comprises a sequence selected from the group consisting of SEQ ID NOs: 2485-2500.

[0448] In some embodiments, the CRISPR nuclease comprises a sequence having at least 90% identity to the amino acid sequence set forth in SEQ ID NO: 105 and at least one RNA molecule is a CRISPR RNA (crRNA) molecule comprising a guide sequence portion and a sequence selected from the group consisting of SEQ ID NOs: 2486-2489.

[0449] In some embodiments, the composition further comprises a transactivating CRISPR RNA (tracrRNA) molecule comprising a sequence set forth in the group consisting of SEQ ID NOs: 2490-2500.

[0450] In some embodiments, the CRISPR nuclease comprises a sequence having at least 90% identity to the amino acid sequence set forth in SEQ ID NO: 105 and at least one RNA molecule is a single-guide RNA (sgRNA) molecule comprising a guide sequence portion and a sequence selected from the group consisting of SEQ ID NOs: 2485-2500.

[0451] In some embodiments, the CRISPR nuclease comprises a sequence having at least 90% identity to the amino acid sequence set forth in SEQ ID NO: 106, and at least one RNA molecule comprises a sequence selected from the group consisting of SEQ ID NOs: 2501-2536.

[0452] In some embodiments, the CRISPR nuclease comprises a sequence having at least 90% identity to the amino acid sequence set forth in SEQ ID NO: 106 and at least one RNA molecule is a CRISPR RNA (crRNA) molecule comprising a guide sequence portion and a sequence selected from the group consisting of SEQ ID NOs: 2502-2505 and 2520-2523.

[0453] In some embodiments, the composition further comprises a transactivating CRISPR RNA (tracrRNA) molecule comprising a sequence set forth in the group consisting of SEQ ID NOs: 2506-2518, 2524-2529, 2531-2534, and 2536.

[0454] In some embodiments, the CRISPR nuclease comprises a sequence having at least 90% identity to the amino acid sequence set forth in SEQ ID NO: 106 and at least one RNA molecule is a single-guide RNA (sgRNA) molecule comprising a guide sequence portion and a sequence selected from the group consisting of SEQ ID NOs: 2501-2536.

[0455] In some embodiments, the CRISPR nuclease comprises a sequence having at least 90% identity to the amino acid sequence set forth in SEQ ID NO: 107, and at least one RNA molecule comprises a sequence selected from the group consisting of SEQ ID NOs: 2537-2552.

[0456] In some embodiments, the CRISPR nuclease comprises a sequence having at least 90% identity to the amino acid sequence set forth in SEQ ID NO: 107 and at least one RNA molecule is a CRISPR RNA (crRNA) molecule comprising a guide sequence portion and a sequence selected from the group consisting of SEQ ID NOs: 2538-2541.

[0457] In some embodiments, the composition further comprises a transactivating CRISPR RNA (tracrRNA) molecule comprising a sequence set forth in the group consisting of SEQ ID NOs: 2542-2552.

[0458] In some embodiments, the CRISPR nuclease comprises a sequence having at least 90% identity to the amino acid sequence set forth in SEQ ID NO: 107 and at least one RNA molecule is a single-guide RNA (sgRNA) molecule comprising a guide sequence portion and a sequence selected from the group consisting of SEQ ID NOs: 2537-2552.

[0459] In some embodiments, the CRISPR nuclease comprises a sequence having at least 90% identity to the amino acid sequence set forth in SEQ ID NO: 108, and at least one RNA molecule comprises a sequence selected from the group consisting of SEQ ID NOs: 2553-2574.

[0460] In some embodiments, the CRISPR nuclease comprises a sequence having at least 90% identity to the amino acid sequence set forth in SEQ ID NO: 108 and at least one RNA molecule is a CRISPR RNA (crRNA) molecule comprising a guide sequence portion and a sequence selected from the group consisting of SEQ ID NOs: 2554-2557.

[0461] In some embodiments, the composition further comprises a transactivating CRISPR RNA (tracrRNA) molecule comprising a sequence set forth in the group consisting of SEQ ID NOs: 2558-2566, 2568-2570, and 2572-2574.

[0462] In some embodiments, the CRISPR nuclease comprises a sequence having at least 90% identity to the amino acid sequence set forth in SEQ ID NO: 108 and at least one RNA molecule is a single-guide RNA (sgRNA) molecule comprising a guide sequence portion and a sequence selected from the group consisting of SEQ ID NOs: 2553-2574.

[0463] In some embodiments, the CRISPR nuclease is a nickase having an inactivated RuvC domain created by an amino acid substitution at a position provided for the CRISPR nuclease in column 5 of Table 1.

[0464] In some embodiments, the CRISPR nuclease is a nickase having an inactivated HNH domain created by an amino acid substitution at a position provided for the CRISPR nuclease in column 6 of Table 1.

[0465] In some embodiments, the CRISPR nuclease is a catalytically dead nuclease having an inactivated RuvC domain and an inactivated HNH domain created by substitutions at the positions provided for the CRISPR nuclease in column 7 of Table 1.

[0466] For example, a nickase may be generated for the OMNI-263 nuclease by inactivating its RuvC domain by substituting an aspartic acid residue (D) in position 9 of the amino acid sequence of OMNI-263 (SEQ ID NO: 1) for another amino acid e.g. alanine (A). Substitution to any other amino acid is permissible for each of the amino acid positions indicated in columns 5-7, unless otherwise indicated in Table 1. Other nickases or catalytically dead nucleases can be generated using the same notation in Table 1.

[0467] In some embodiments, the CRISPR nuclease utilizes a protospacer adjacent motif (PAM) sequence provided for the CRISPR nuclease in any one of columns 2-7 of Table 3. A CRISPR nuclease utilizes a PAM sequence as a targeting component in addition to a spacer sequence of a guide molecule.

[0468] The invention also provides a method for modifying a nucleotide sequence at a DNA target site in a cell-free system or the genome of a cell comprising introducing into the cell any one of the compositions described above. In some embodiments, the composition comprises a CRISPR nuclease and a crRNA:tracrRNA complex or a sgRNA molecule.

[0469] In some embodiments, the CRISPR nuclease effects a DNA break in a DNA strand adjacent to a protospacer adjacent motif (PAM) sequence provided for the CRISPR nuclease in any one of columns 2-7 of Table 3, and effects a DNA break in a DNA strand adjacent to a sequence that is complementary to the PAM sequence. For example, the OMNI-263 nuclease with, the appropriate targeting sgRNA or crRNA:tracrRNA complex, is capable of forming a DNA break in strand adjacent to a NNNRCM or NNNRCC sequence and in a DNA strand adjacent to a sequence that is complementary to a NNNRCM or NNNRCC sequence. In another example, the OMNI-281 nuclease, with the appropriate targeting sgRNA or crRNA:tracrRNA complex, is capable of forming a DNA break in strand adjacent to a NNGRNNNN, NNGRVNNN, or NNGAVNNN sequence and in a DNA strand adjacent to a sequence that is complementary to a NNGRNNNN, NNGRVNNN, or NNGAVNNN sequence.

[0470] In some embodiments, the DNA strand is within a nucleus of a cell.

[0471] In some embodiments, the CRISPR nuclease is a nickase having an inactivated RuvC domain created by an amino acid substitution at a position provided for the CRISPR nuclease in column 5 of Table 1, and effects a DNA break in a DNA strand adjacent to a sequence that is complementary to the PAM sequence.

[0472] In some embodiments, the CRISPR nuclease is a nickase having an inactivated HNH domain created by an amino acid substitution at a position provided for the CRISPR nuclease in column 6 of Table 1, and effects a DNA break in a DNA strand adjacent to the PAM sequence.

[0473] In some embodiments, the CRISPR nuclease is a catalytically dead nuclease having an inactivated RuvC domain and an inactivated HNH domain created by substitutions at the positions provided for the CRISPR nuclease in column 7 of Table 1, and effects a DNA break in a DNA strand adjacent to the PAM sequence.

[0474] In some embodiments, the cell is a eukaryotic cell or a prokaryotic cell.

[0475] In some embodiments, the cell is a mammalian cell.

[0476] In some embodiments, the cell is a human cell.

[0477] In some embodiments, the CRISPR nuclease comprises an amino acid sequence having at least 100%, 99%, 98%, 97%, 96%, 95%, 94%, 93%, 92%, 91%, 90%, 89%, 88%, 87%, 86%, 85%, 84%, 83%, or 82% amino acid sequence identity to a CRISPR nuclease as set forth in any of SEQ ID NOs: 1-108. In an embodiment the sequence encoding the CRISPR nuclease has at least 95% identity to a nucleic acid sequence selected from the group consisting of SEQ ID NOs: 109-324.

[0478] According to some aspects of the invention, the disclosed compositions comprise DNA constructs or a vector system comprising nucleotide sequences that encode the CRISPR nuclease or variant CRISPR nuclease. In some embodiments, the nucleotide sequence that encode the CRISPR nuclease or variant CRISPR nuclease is operably linked to a promoter that is operable in the cells of interest. In some embodiments, the cell of interest is a eukaryotic cell. In some embodiments the cell of interest is a mammalian cell. In some embodiments, the nucleic acid sequence encoding the engineered CRISPR nuclease is codon optimized for use in cells from a particular organism. In some embodiments, the nucleic acid sequence encoding the nuclease is codon optimized for E. coli. In some embodiments, the nucleic acid sequence encoding the nuclease is codon optimized for eukaryotic cells. In some embodiments, the nucleic acid sequence encoding the nuclease is codon optimized for mammalian cells.

[0479] In some embodiments, the composition comprises a recombinant nucleic acid, comprising a heterologous promoter operably linked to a polynucleotide encoding a CRISPR enzyme having at least 100%, 99%, 98%, 97%, 96%, 95%, 94%, 93%, 92%, 91%, 90% identity to any of SEQ ID NOs: 1-108. Each possibility represents a separate embodiment.

[0480] In an embodiment of the composition, the CRISPR nuclease has at least 75%, 80%, 85, 90%, 95%, 97%, 98%, 99%, or 100% identity to the amino acid sequence as set forth in SEQ ID NO: 1 or the sequence encoding the CRISPR nuclease has at least a 75%, 80%, 85, 90%, 95%, 97%, 98%, 99%, or 100% sequence identity to a nucleotide sequence selected from the group consisting of SEQ ID NOs: 109 and 217.

[0481] In an embodiment of the composition, the CRISPR nuclease has at least 75%, 80%, 85, 90%, 95%, 97%, 98%, 99%, or 100% identity to the amino acid sequence as set forth in SEQ ID NO: 2 or the sequence encoding the CRISPR nuclease has at least a 75%, 80%, 85, 90%, 95%, 97%, 98%, 99%, or 100% sequence identity to a nucleotide sequence selected from the group consisting of SEQ ID NOs: 110 and 218.

[0482] In an embodiment of the composition, the CRISPR nuclease has at least 75%, 80%, 85, 90%, 95%, 97%, 98%, 99%, or 100% identity to the amino acid sequence as set forth in SEQ ID NO: 3 or the sequence encoding the CRISPR nuclease has at least a 75%, 80%, 85, 90%, 95%, 97%, 98%, 99%, or 100% sequence identity to a nucleotide sequence selected from the group consisting of SEQ ID NOs: 111 and 219.

[0483] In an embodiment of the composition, the CRISPR nuclease has at least 75%, 80%, 85, 90%, 95%, 97%, 98%, 99%, or 100% identity to the amino acid sequence as set forth in SEQ ID NO: 4 or the sequence encoding the CRISPR nuclease has at least a 75%, 80%, 85, 90%, 95%, 97%, 98%, 99%, or 100% sequence identity to a nucleotide sequence selected from the group consisting of SEQ ID NOs: 112 and 220.

[0484] In an embodiment of the composition, the CRISPR nuclease has at least 75%, 80%, 85, 90%, 95%, 97%, 98%, 99%, or 100% identity to the amino acid sequence as set forth in SEQ ID NO: 5 or the sequence encoding the CRISPR nuclease has at least a 75%, 80%, 85, 90%, 95%, 97%, 98%, 99%, or 100% sequence identity to a nucleotide sequence selected from the group consisting of SEQ ID NOs: 113 and 221.

[0485] In an embodiment of the composition, the CRISPR nuclease has at least 75%, 80%, 85, 90%, 95%, 97%, 98%, 99%, or 100% identity to the amino acid sequence as set forth in SEQ ID NO: 6 or the sequence encoding the CRISPR nuclease has at least a 75%, 80%, 85, 90%, 95%, 97%, 98%, 99%, or 100% sequence identity to a nucleotide sequence selected from the group consisting of SEQ ID NOs: 114 and 222.

[0486] In an embodiment of the composition, the CRISPR nuclease has at least 75%, 80%, 85, 90%, 95%, 97%, 98%, 99%, or 100% identity to the amino acid sequence as set forth in SEQ ID NO: 7 or the sequence encoding the CRISPR nuclease has at least a 75%, 80%, 85, 90%, 95%, 97%, 98%, 99%, or 100% sequence identity to a nucleotide sequence selected from the group consisting of SEQ ID NOs: 115 and 223.

[0487] In an embodiment of the composition, the CRISPR nuclease has at least 75%, 80%, 85, 90%, 95%, 97%, 98%, 99%, or 100% identity to the amino acid sequence as set forth in SEQ ID NO: 8 or the sequence encoding the CRISPR nuclease has at least a 75%, 80%, 85, 90%, 95%, 97%, 98%, 99%, or 100% sequence identity to a nucleotide sequence selected from the group consisting of SEQ ID NOs: 116 and 224.

[0488] In an embodiment of the composition, the CRISPR nuclease has at least 75%, 80%, 85, 90%, 95%, 97%, 98%, 99%, or 100% identity to the amino acid sequence as set forth in SEQ ID NO: 9 or the sequence encoding the CRISPR nuclease has at least a 75%, 80%, 85, 90%, 95%, 97%, 98%, 99%, or 100% sequence identity to a nucleotide sequence selected from the group consisting of SEQ ID NOs: 117 and 225.

[0489] In an embodiment of the composition, the CRISPR nuclease has at least 75%, 80%, 85, 90%, 95%, 97%, 98%, 99%, or 100% identity to the amino acid sequence as set forth in SEQ ID NO: 10 or the sequence encoding the CRISPR nuclease has at least a 75%, 80%, 85, 90%, 95%, 97%, 98%, 99%, or 100% sequence identity to a nucleotide sequence selected from the group consisting of SEQ ID NOs: 118 and 226.

[0490] In an embodiment of the composition, the CRISPR nuclease has at least 75%, 80%, 85, 90%, 95%, 97%, 98%, 99%, or 100% identity to the amino acid sequence as set forth in SEQ ID NO: 11 or the sequence encoding the CRISPR nuclease has at least a 75%, 80%, 85, 90%, 95%, 97%, 98%, 99%, or 100% sequence identity to a nucleotide sequence selected from the group consisting of SEQ ID NOs: 119 and 227.

[0491] In an embodiment of the composition, the CRISPR nuclease has at least 75%, 80%, 85, 90%, 95%, 97%, 98%, 99%, or 100% identity to the amino acid sequence as set forth in SEQ ID NO: 12 or the sequence encoding the CRISPR nuclease has at least a 75%, 80%, 85, 90%, 95%, 97%, 98%, 99%, or 100% sequence identity to a nucleotide sequence selected from the group consisting of SEQ ID NOs: 120 and 228.

[0492] In an embodiment of the composition, the CRISPR nuclease has at least 75%, 80%, 85, 90%, 95%, 97%, 98%, 99%, or 100% identity to the amino acid sequence as set forth in SEQ ID NO: 13 or the sequence encoding the CRISPR nuclease has at least a 75%, 80%, 85, 90%, 95%, 97%, 98%, 99%, or 100% sequence identity to a nucleotide sequence selected from the group consisting of SEQ ID NOs: 121 and 229.

[0493] In an embodiment of the composition, the CRISPR nuclease has at least 75%, 80%, 85, 90%, 95%, 97%, 98%, 99%, or 100% identity to the amino acid sequence as set forth in SEQ ID NO: 14 or the sequence encoding the CRISPR nuclease has at least a 75%, 80%, 85, 90%, 95%, 97%, 98%, 99%, or 100% sequence identity to a nucleotide sequence selected from the group consisting of SEQ ID NOs: 122 and 230.

[0494] In an embodiment of the composition, the CRISPR nuclease has at least 75%, 80%, 85, 90%, 95%, 97%, 98%, 99%, or 100% identity to the amino acid sequence as set forth in SEQ ID NO: 15 or the sequence encoding the CRISPR nuclease has at least a 75%, 80%, 85, 90%, 95%, 97%, 98%, 99%, or 100% sequence identity to a nucleotide sequence selected from the group consisting of SEQ ID NOs: 123 and 231.

[0495] In an embodiment of the composition, the CRISPR nuclease has at least 75%, 80%, 85, 90%, 95%, 97%, 98%, 99%, or 100% identity to the amino acid sequence as set forth in SEQ ID NO: 16 or the sequence encoding the CRISPR nuclease has at least a 75%, 80%, 85, 90%, 95%, 97%, 98%, 99%, or 100% sequence identity to a nucleotide sequence selected from the group consisting of SEQ ID NOs: 124 and 232.

[0496] In an embodiment of the composition, the CRISPR nuclease has at least 75%, 80%, 85, 90%, 95%, 97%, 98%, 99%, or 100% identity to the amino acid sequence as set forth in SEQ ID NO: 17 or the sequence encoding the CRISPR nuclease has at least a 75%, 80%, 85, 90%, 95%, 97%, 98%, 99%, or 100% sequence identity to a nucleotide sequence selected from the group consisting of SEQ ID NOs: 125 and 233.

[0497] In an embodiment of the composition, the CRISPR nuclease has at least 75%, 80%, 85, 90%, 95%, 97%, 98%, 99%, or 100% identity to the amino acid sequence as set forth in SEQ ID NO: 18 or the sequence encoding the CRISPR nuclease has at least a 75%, 80%, 85, 90%, 95%, 97%, 98%, 99%, or 100% sequence identity to a nucleotide sequence selected from the group consisting of SEQ ID NOs: 126 and 234.

[0498] In an embodiment of the composition, the CRISPR nuclease has at least 75%, 80%, 85, 90%, 95%, 97%, 98%, 99%, or 100% identity to the amino acid sequence as set forth in SEQ ID NO: 19 or the sequence encoding the CRISPR nuclease has at least a 75%, 80%, 85, 90%, 95%, 97%, 98%, 99%, or 100% sequence identity to a nucleotide sequence selected from the group consisting of SEQ ID NOs: 127 and 235.

[0499] In an embodiment of the composition, the CRISPR nuclease has at least 75%, 80%, 85, 90%, 95%, 97%, 98%, 99%, or 100% identity to the amino acid sequence as set forth in SEQ ID NO: 20 or the sequence encoding the CRISPR nuclease has at least a 75%, 80%, 85, 90%, 95%, 97%, 98%, 99%, or 100% sequence identity to a nucleotide sequence selected from the group consisting of SEQ ID NOs: 128 and 236.

[0500] In an embodiment of the composition, the CRISPR nuclease has at least 75%, 80%, 85, 90%, 95%, 97%, 98%, 99%, or 100% identity to the amino acid sequence as set forth in SEQ ID NO: 21 or the sequence encoding the CRISPR nuclease has at least a 75%, 80%, 85, 90%, 95%, 97%, 98%, 99%, or 100% sequence identity to a nucleotide sequence selected from the group consisting of SEQ ID NOs: 129 and 237.

[0501] In an embodiment of the composition, the CRISPR nuclease has at least 75%, 80%, 85, 90%, 95%, 97%, 98%, 99%, or 100% identity to the amino acid sequence as set forth in SEQ ID NO: 22 or the sequence encoding the CRISPR nuclease has at least a 75%, 80%, 85, 90%, 95%, 97%, 98%, 99%, or 100% sequence identity to a nucleotide sequence selected from the group consisting of SEQ ID NOs: 130 and 238.

[0502] In an embodiment of the composition, the CRISPR nuclease has at least 75%, 80%, 85, 90%, 95%, 97%, 98%, 99%, or 100% identity to the amino acid sequence as set forth in SEQ ID NO: 23 or the sequence encoding the CRISPR nuclease has at least a 75%, 80%, 85, 90%, 95%, 97%, 98%, 99%, or 100% sequence identity to a nucleotide sequence selected from the group consisting of SEQ ID NOs: 131 and 239.

[0503] In an embodiment of the composition, the CRISPR nuclease has at least 75%, 80%, 85, 90%, 95%, 97%, 98%, 99%, or 100% identity to the amino acid sequence as set forth in SEQ ID NO: 24 or the sequence encoding the CRISPR nuclease has at least a 75%, 80%, 85, 90%, 95%, 97%, 98%, 99%, or 100% sequence identity to a nucleotide sequence selected from the group consisting of SEQ ID NOs: 132 and 240.

[0504] In an embodiment of the composition, the CRISPR nuclease has at least 75%, 80%, 85, 90%, 95%, 97%, 98%, 99%, or 100% identity to the amino acid sequence as set forth in SEQ ID NO: 25 or the sequence encoding the CRISPR nuclease has at least a 75%, 80%, 85, 90%, 95%, 97%, 98%, 99%, or 100% sequence identity to a nucleotide sequence selected from the group consisting of SEQ ID NOs: 133 and 241.

[0505] In an embodiment of the composition, the CRISPR nuclease has at least 75%, 80%, 85, 90%, 95%, 97%, 98%, 99%, or 100% identity to the amino acid sequence as set forth in SEQ ID NO: 26 or the sequence encoding the CRISPR nuclease has at least a 75%, 80%, 85, 90%, 95%, 97%, 98%, 99%, or 100% sequence identity to a nucleotide sequence selected from the group consisting of SEQ ID NOs: 134 and 242.

[0506] In an embodiment of the composition, the CRISPR nuclease has at least 75%, 80%, 85, 90%, 95%, 97%, 98%, 99%, or 100% identity to the amino acid sequence as set forth in SEQ ID NO: 27 or the sequence encoding the CRISPR nuclease has at least a 75%, 80%, 85, 90%, 95%, 97%, 98%, 99%, or 100% sequence identity to a nucleotide sequence selected from the group consisting of SEQ ID NOs: 135 and 243.

[0507] In an embodiment of the composition, the CRISPR nuclease has at least 75%, 80%, 85, 90%, 95%, 97%, 98%, 99%, or 100% identity to the amino acid sequence as set forth in SEQ ID NO: 28 or the sequence encoding the CRISPR nuclease has at least a 75%, 80%, 85, 90%, 95%, 97%, 98%, 99%, or 100% sequence identity to a nucleotide sequence selected from the group consisting of SEQ ID NOs: 136 and 244.

[0508] In an embodiment of the composition, the CRISPR nuclease has at least 75%, 80%, 85, 90%, 95%, 97%, 98%, 99%, or 100% identity to the amino acid sequence as set forth in SEQ ID NO: 29 or the sequence encoding the CRISPR nuclease has at least a 75%, 80%, 85, 90%, 95%, 97%, 98%, 99%, or 100% sequence identity to a nucleotide sequence selected from the group consisting of SEQ ID NOs: 137 and 245.

[0509] In an embodiment of the composition, the CRISPR nuclease has at least 75%, 80%, 85, 90%, 95%, 97%, 98%, 99%, or 100% identity to the amino acid sequence as set forth in SEQ ID NO: 30 or the sequence encoding the CRISPR nuclease has at least a 75%, 80%, 85, 90%, 95%, 97%, 98%, 99%, or 100% sequence identity to a nucleotide sequence selected from the group consisting of SEQ ID NOs: 138 and 246.

[0510] In an embodiment of the composition, the CRISPR nuclease has at least 75%, 80%, 85, 90%, 95%, 97%, 98%, 99%, or 100% identity to the amino acid sequence as set forth in SEQ ID NO: 31 or the sequence encoding the CRISPR nuclease has at least a 75%, 80%, 85, 90%, 95%, 97%, 98%, 99%, or 100% sequence identity to a nucleotide sequence selected from the group consisting of SEQ ID NOs: 139 and 247.

[0511] In an embodiment of the composition, the CRISPR nuclease has at least 75%, 80%, 85, 90%, 95%, 97%, 98%, 99%, or 100% identity to the amino acid sequence as set forth in SEQ ID NO: 32 or the sequence encoding the CRISPR nuclease has at least a 75%, 80%, 85, 90%, 95%, 97%, 98%, 99%, or 100% sequence identity to a nucleotide sequence selected from the group consisting of SEQ ID NOs: 140 and 248.

[0512] In an embodiment of the composition, the CRISPR nuclease has at least 75%, 80%, 85, 90%, 95%, 97%, 98%, 99%, or 100% identity to the amino acid sequence as set forth in SEQ ID NO: 33 or the sequence encoding the CRISPR nuclease has at least a 75%, 80%, 85, 90%, 95%, 97%, 98%, 99%, or 100% sequence identity to a nucleotide sequence selected from the group consisting of SEQ ID NOs: 141 and 249.

[0513] In an embodiment of the composition, the CRISPR nuclease has at least 75%, 80%, 85, 90%, 95%, 97%, 98%, 99%, or 100% identity to the amino acid sequence as set forth in SEQ ID NO: 34 or the sequence encoding the CRISPR nuclease has at least a 75%, 80%, 85, 90%, 95%, 97%, 98%, 99%, or 100% sequence identity to a nucleotide sequence selected from the group consisting of SEQ ID NOs: 142 and 250.

[0514] In an embodiment of the composition, the CRISPR nuclease has at least 75%, 80%, 85, 90%, 95%, 97%, 98%, 99%, or 100% identity to the amino acid sequence as set forth in SEQ ID NO: 35 or the sequence encoding the CRISPR nuclease has at least a 75%, 80%, 85, 90%, 95%, 97%, 98%, 99%, or 100% sequence identity to a nucleotide sequence selected from the group consisting of SEQ ID NOs: 143 and 251.

[0515] In an embodiment of the composition, the CRISPR nuclease has at least 75%, 80%, 85, 90%, 95%, 97%, 98%, 99%, or 100% identity to the amino acid sequence as set forth in SEQ ID NO: 36 or the sequence encoding the CRISPR nuclease has at least a 75%, 80%, 85, 90%, 95%, 97%, 98%, 99%, or 100% sequence identity to a nucleotide sequence selected from the group consisting of SEQ ID NOs: 144 and 252.

[0516] In an embodiment of the composition, the CRISPR nuclease has at least 75%, 80%, 85, 90%, 95%, 97%, 98%, 99%, or 100% identity to the amino acid sequence as set forth in SEQ ID NO: 37 or the sequence encoding the CRISPR nuclease has at least a 75%, 80%, 85, 90%, 95%, 97%, 98%, 99%, or 100% sequence identity to a nucleotide sequence selected from the group consisting of SEQ ID NOs: 145 and 253.

[0517] In an embodiment of the composition, the CRISPR nuclease has at least 75%, 80%, 85, 90%, 95%, 97%, 98%, 99%, or 100% identity to the amino acid sequence as set forth in SEQ ID NO: 38 or the sequence encoding the CRISPR nuclease has at least a 75%, 80%, 85, 90%, 95%, 97%, 98%, 99%, or 100% sequence identity to a nucleotide sequence selected from the group consisting of SEQ ID NOs: 146 and 254.

[0518] In an embodiment of the composition, the CRISPR nuclease has at least 75%, 80%, 85, 90%, 95%, 97%, 98%, 99%, or 100% identity to the amino acid sequence as set forth in SEQ ID NO: 39 or the sequence encoding the CRISPR nuclease has at least a 75%, 80%, 85, 90%, 95%, 97%, 98%, 99%, or 100% sequence identity to a nucleotide sequence selected from the group consisting of SEQ ID NOs: 147 and 255.

[0519] In an embodiment of the composition, the CRISPR nuclease has at least 75%, 80%, 85, 90%, 95%, 97%, 98%, 99%, or 100% identity to the amino acid sequence as set forth in SEQ ID NO: 40 or the sequence encoding the CRISPR nuclease has at least a 75%, 80%, 85, 90%, 95%, 97%, 98%, 99%, or 100% sequence identity to a nucleotide sequence selected from the group consisting of SEQ ID NOs: 148 and 256.

[0520] In an embodiment of the composition, the CRISPR nuclease has at least 75%, 80%, 85, 90%, 95%, 97%, 98%, 99%, or 100% identity to the amino acid sequence as set forth in SEQ ID NO: 41 or the sequence encoding the CRISPR nuclease has at least a 75%, 80%, 85, 90%, 95%, 97%, 98%, 99%, or 100% sequence identity to a nucleotide sequence selected from the group consisting of SEQ ID NOs: 149 and 257.

[0521] In an embodiment of the composition, the CRISPR nuclease has at least 75%, 80%, 85, 90%, 95%, 97%, 98%, 99%, or 100% identity to the amino acid sequence as set forth in SEQ ID NO: 42 or the sequence encoding the CRISPR nuclease has at least a 75%, 80%, 85, 90%, 95%, 97%, 98%, 99%, or 100% sequence identity to a nucleotide sequence selected from the group consisting of SEQ ID NOs: 150 and 258.

[0522] In an embodiment of the composition, the CRISPR nuclease has at least 75%, 80%, 85, 90%, 95%, 97%, 98%, 99%, or 100% identity to the amino acid sequence as set forth in SEQ ID NO: 43 or the sequence encoding the CRISPR nuclease has at least a 75%, 80%, 85, 90%, 95%, 97%, 98%, 99%, or 100% sequence identity to a nucleotide sequence selected from the group consisting of SEQ ID NOs: 151 and 259.

[0523] In an embodiment of the composition, the CRISPR nuclease has at least 75%, 80%, 85, 90%, 95%, 97%, 98%, 99%, or 100% identity to the amino acid sequence as set forth in SEQ ID NO: 44 or the sequence encoding the CRISPR nuclease has at least a 75%, 80%, 85, 90%, 95%, 97%, 98%, 99%, or 100% sequence identity to a nucleotide sequence selected from the group consisting of SEQ ID NOs: 152 and 260.

[0524] In an embodiment of the composition, the CRISPR nuclease has at least 75%, 80%, 85, 90%, 95%, 97%, 98%, 99%, or 100% identity to the amino acid sequence as set forth in SEQ ID NO: 45 or the sequence encoding the CRISPR nuclease has at least a 75%, 80%, 85, 90%, 95%, 97%, 98%, 99%, or 100% sequence identity to a nucleotide sequence selected from the group consisting of SEQ ID NOs: 153 and 261.

[0525] In an embodiment of the composition, the CRISPR nuclease has at least 75%, 80%, 85, 90%, 95%, 97%, 98%, 99%, or 100% identity to the amino acid sequence as set forth in SEQ ID NO: 46 or the sequence encoding the CRISPR nuclease has at least a 75%, 80%, 85, 90%, 95%, 97%, 98%, 99%, or 100% sequence identity to a nucleotide sequence selected from the group consisting of SEQ ID NOs: 154 and 262.

[0526] In an embodiment of the composition, the CRISPR nuclease has at least 75%, 80%, 85, 90%, 95%, 97%, 98%, 99%, or 100% identity to the amino acid sequence as set forth in SEQ ID NO: 47 or the sequence encoding the CRISPR nuclease has at least a 75%, 80%, 85, 90%, 95%, 97%, 98%, 99%, or 100% sequence identity to a nucleotide sequence selected from the group consisting of SEQ ID NOs: 155 and 263.

[0527] In an embodiment of the composition, the CRISPR nuclease has at least 75%, 80%, 85, 90%, 95%, 97%, 98%, 99%, or 100% identity to the amino acid sequence as set forth in SEQ ID NO: 48 or the sequence encoding the CRISPR nuclease has at least a 75%, 80%, 85, 90%, 95%, 97%, 98%, 99%, or 100% sequence identity to a nucleotide sequence selected from the group consisting of SEQ ID NOs: 156 and 264.

[0528] In an embodiment of the composition, the CRISPR nuclease has at least 75%, 80%, 85, 90%, 95%, 97%, 98%, 99%, or 100% identity to the amino acid sequence as set forth in SEQ ID NO: 49 or the sequence encoding the CRISPR nuclease has at least a 75%, 80%, 85, 90%, 95%, 97%, 98%, 99%, or 100% sequence identity to a nucleotide sequence selected from the group consisting of SEQ ID NOs: 157 and 265.

[0529] In an embodiment of the composition, the CRISPR nuclease has at least 75%, 80%, 85, 90%, 95%, 97%, 98%, 99%, or 100% identity to the amino acid sequence as set forth in SEQ ID NO: 50 or the sequence encoding the CRISPR nuclease has at least a 75%, 80%, 85, 90%, 95%, 97%, 98%, 99%, or 100% sequence identity to a nucleotide sequence selected from the group consisting of SEQ ID NOs: 158 and 266.

[0530] In an embodiment of the composition, the CRISPR nuclease has at least 75%, 80%, 85, 90%, 95%, 97%, 98%, 99%, or 100% identity to the amino acid sequence as set forth in SEQ ID NO: 51 or the sequence encoding the CRISPR nuclease has at least a 75%, 80%, 85, 90%, 95%, 97%, 98%, 99%, or 100% sequence identity to a nucleotide sequence selected from the group consisting of SEQ ID NOs: 159 and 267.

[0531] In an embodiment of the composition, the CRISPR nuclease has at least 75%, 80%, 85, 90%, 95%, 97%, 98%, 99%, or 100% identity to the amino acid sequence as set forth in SEQ ID NO: 52 or the sequence encoding the CRISPR nuclease has at least a 75%, 80%, 85, 90%, 95%, 97%, 98%, 99%, or 100% sequence identity to a nucleotide sequence selected from the group consisting of SEQ ID NOs: 160 and 268.

[0532] In an embodiment of the composition, the CRISPR nuclease has at least 75%, 80%, 85, 90%, 95%, 97%, 98%, 99%, or 100% identity to the amino acid sequence as set forth in SEQ ID NO: 53 or the sequence encoding the CRISPR nuclease has at least a 75%, 80%, 85, 90%, 95%, 97%, 98%, 99%, or 100% sequence identity to a nucleotide sequence selected from the group consisting of SEQ ID NOs: 161 and 269.

[0533] In an embodiment of the composition, the CRISPR nuclease has at least 75%, 80%, 85, 90%, 95%, 97%, 98%, 99%, or 100% identity to the amino acid sequence as set forth in SEQ ID NO: 54 or the sequence encoding the CRISPR nuclease has at least a 75%, 80%, 85, 90%, 95%, 97%, 98%, 99%, or 100% sequence identity to a nucleotide sequence selected from the group consisting of SEQ ID NOs: 162 and 270.

[0534] In an embodiment of the composition, the CRISPR nuclease has at least 75%, 80%, 85, 90%, 95%, 97%, 98%, 99%, or 100% identity to the amino acid sequence as set forth in SEQ ID NO: 55 or the sequence encoding the CRISPR nuclease has at least a 75%, 80%, 85, 90%, 95%, 97%, 98%, 99%, or 100% sequence identity to a nucleotide sequence selected from the group consisting of SEQ ID NOs: 163 and 271.

[0535] In an embodiment of the composition, the CRISPR nuclease has at least 75%, 80%, 85, 90%, 95%, 97%, 98%, 99%, or 100% identity to the amino acid sequence as set forth in SEQ ID NO: 56 or the sequence encoding the CRISPR nuclease has at least a 75%, 80%, 85, 90%, 95%, 97%, 98%, 99%, or 100% sequence identity to a nucleotide sequence selected from the group consisting of SEQ ID NOs: 164 and 272.

[0536] In an embodiment of the composition, the CRISPR nuclease has at least 75%, 80%, 85, 90%, 95%, 97%, 98%, 99%, or 100% identity to the amino acid sequence as set forth in SEQ ID NO: 57 or the sequence encoding the CRISPR nuclease has at least a 75%, 80%, 85, 90%, 95%, 97%, 98%, 99%, or 100% sequence identity to a nucleotide sequence selected from the group consisting of SEQ ID NOs: 165 and 273.

[0537] In an embodiment of the composition, the CRISPR nuclease has at least 75%, 80%, 85, 90%, 95%, 97%, 98%, 99%, or 100% identity to the amino acid sequence as set forth in SEQ ID NO: 58 or the sequence encoding the CRISPR nuclease has at least a 75%, 80%, 85, 90%, 95%, 97%, 98%, 99%, or 100% sequence identity to a nucleotide sequence selected from the group consisting of SEQ ID NOs: 166 and 274.

[0538] In an embodiment of the composition, the CRISPR nuclease has at least 75%, 80%, 85, 90%, 95%, 97%, 98%, 99%, or 100% identity to the amino acid sequence as set forth in SEQ ID NO: 59 or the sequence encoding the CRISPR nuclease has at least a 75%, 80%, 85, 90%, 95%, 97%, 98%, 99%, or 100% sequence identity to a nucleotide sequence selected from the group consisting of SEQ ID NOs: 167 and 275.

[0539] In an embodiment of the composition, the CRISPR nuclease has at least 75%, 80%, 85, 90%, 95%, 97%, 98%, 99%, or 100% identity to the amino acid sequence as set forth in SEQ ID NO: 60 or the sequence encoding the CRISPR nuclease has at least a 75%, 80%, 85, 90%, 95%, 97%, 98%, 99%, or 100% sequence identity to a nucleotide sequence selected from the group consisting of SEQ ID NOs: 168 and 276.

[0540] In an embodiment of the composition, the CRISPR nuclease has at least 75%, 80%, 85, 90%, 95%, 97%, 98%, 99%, or 100% identity to the amino acid sequence as set forth in SEQ ID NO: 61 or the sequence encoding the CRISPR nuclease has at least a 75%, 80%, 85, 90%, 95%, 97%, 98%, 99%, or 100% sequence identity to a nucleotide sequence selected from the group consisting of SEQ ID NOs: 169 and 277.

[0541] In an embodiment of the composition, the CRISPR nuclease has at least 75%, 80%, 85, 90%, 95%, 97%, 98%, 99%, or 100% identity to the amino acid sequence as set forth in SEQ ID NO: 62 or the sequence encoding the CRISPR nuclease has at least a 75%, 80%, 85, 90%, 95%, 97%, 98%, 99%, or 100% sequence identity to a nucleotide sequence selected from the group consisting of SEQ ID NOs: 170 and 278.

[0542] In an embodiment of the composition, the CRISPR nuclease has at least 75%, 80%, 85, 90%, 95%, 97%, 98%, 99%, or 100% identity to the amino acid sequence as set forth in SEQ ID NO: 63 or the sequence encoding the CRISPR nuclease has at least a 75%, 80%, 85, 90%, 95%, 97%, 98%, 99%, or 100% sequence identity to a nucleotide sequence selected from the group consisting of SEQ ID NOs: 171 and 279.

[0543] In an embodiment of the composition, the CRISPR nuclease has at least 75%, 80%, 85, 90%, 95%, 97%, 98%, 99%, or 100% identity to the amino acid sequence as set forth in SEQ ID NO: 64 or the sequence encoding the CRISPR nuclease has at least a 75%, 80%, 85, 90%, 95%, 97%, 98%, 99%, or 100% sequence identity to a nucleotide sequence selected from the group consisting of SEQ ID NOs: 172 and 280.

[0544] In an embodiment of the composition, the CRISPR nuclease has at least 75%, 80%, 85, 90%, 95%, 97%, 98%, 99%, or 100% identity to the amino acid sequence as set forth in SEQ ID NO: 65 or the sequence encoding the CRISPR nuclease has at least a 75%, 80%, 85, 90%, 95%, 97%, 98%, 99%, or 100% sequence identity to a nucleotide sequence selected from the group consisting of SEQ ID NOs: 173 and 281.

[0545] In an embodiment of the composition, the CRISPR nuclease has at least 75%, 80%, 85, 90%, 95%, 97%, 98%, 99%, or 100% identity to the amino acid sequence as set forth in SEQ ID NO: 66 or the sequence encoding the CRISPR nuclease has at least a 75%, 80%, 85, 90%, 95%, 97%, 98%, 99%, or 100% sequence identity to a nucleotide sequence selected from the group consisting of SEQ ID NOs: 174 and 282.

[0546] In an embodiment of the composition, the CRISPR nuclease has at least 75%, 80%, 85, 90%, 95%, 97%, 98%, 99%, or 100% identity to the amino acid sequence as set forth in SEQ ID NO: 67 or the sequence encoding the CRISPR nuclease has at least a 75%, 80%, 85, 90%, 95%, 97%, 98%, 99%, or 100% sequence identity to a nucleotide sequence selected from the group consisting of SEQ ID NOs: 175 and 283.

[0547] In an embodiment of the composition, the CRISPR nuclease has at least 75%, 80%, 85, 90%, 95%, 97%, 98%, 99%, or 100% identity to the amino acid sequence as set forth in SEQ ID NO: 68 or the sequence encoding the CRISPR nuclease has at least a 75%, 80%, 85, 90%, 95%, 97%, 98%, 99%, or 100% sequence identity to a nucleotide sequence selected from the group consisting of SEQ ID NOs: 176 and 284.

[0548] In an embodiment of the composition, the CRISPR nuclease has at least 75%, 80%, 85, 90%, 95%, 97%, 98%, 99%, or 100% identity to the amino acid sequence as set forth in SEQ ID NO: 69 or the sequence encoding the CRISPR nuclease has at least a 75%, 80%, 85, 90%, 95%, 97%, 98%, 99%, or 100% sequence identity to a nucleotide sequence selected from the group consisting of SEQ ID NOs: 177 and 285.

[0549] In an embodiment of the composition, the CRISPR nuclease has at least 75%, 80%, 85, 90%, 95%, 97%, 98%, 99%, or 100% identity to the amino acid sequence as set forth in SEQ ID NO: 70 or the sequence encoding the CRISPR nuclease has at least a 75%, 80%, 85, 90%, 95%, 97%, 98%, 99%, or 100% sequence identity to a nucleotide sequence selected from the group consisting of SEQ ID NOs: 178 and 286.

[0550] In an embodiment of the composition, the CRISPR nuclease has at least 75%, 80%, 85, 90%, 95%, 97%, 98%, 99%, or 100% identity to the amino acid sequence as set forth in SEQ ID NO: 71 or the sequence encoding the CRISPR nuclease has at least a 75%, 80%, 85, 90%, 95%, 97%, 98%, 99%, or 100% sequence identity to a nucleotide sequence selected from the group consisting of SEQ ID NOs: 179 and 287.

[0551] In an embodiment of the composition, the CRISPR nuclease has at least 75%, 80%, 85, 90%, 95%, 97%, 98%, 99%, or 100% identity to the amino acid sequence as set forth in SEQ ID NO: 72 or the sequence encoding the CRISPR nuclease has at least a 75%, 80%, 85, 90%, 95%, 97%, 98%, 99%, or 100% sequence identity to a nucleotide sequence selected from the group consisting of SEQ ID NOs: 180 and 288.

[0552] In an embodiment of the composition, the CRISPR nuclease has at least 75%, 80%, 85, 90%, 95%, 97%, 98%, 99%, or 100% identity to the amino acid sequence as set forth in SEQ ID NO: 73 or the sequence encoding the CRISPR nuclease has at least a 75%, 80%, 85, 90%, 95%, 97%, 98%, 99%, or 100% sequence identity to a nucleotide sequence selected from the group consisting of SEQ ID NOs: 181 and 289.

[0553] In an embodiment of the composition, the CRISPR nuclease has at least 75%, 80%, 85, 90%, 95%, 97%, 98%, 99%, or 100% identity to the amino acid sequence as set forth in SEQ ID NO: 74 or the sequence encoding the CRISPR nuclease has at least a 75%, 80%, 85, 90%, 95%, 97%, 98%, 99%, or 100% sequence identity to a nucleotide sequence selected from the group consisting of SEQ ID NOs: 182 and 290.

[0554] In an embodiment of the composition, the CRISPR nuclease has at least 75%, 80%, 85, 90%, 95%, 97%, 98%, 99%, or 100% identity to the amino acid sequence as set forth in SEQ ID NO: 75 or the sequence encoding the CRISPR nuclease has at least a 75%, 80%, 85, 90%, 95%, 97%, 98%, 99%, or 100% sequence identity to a nucleotide sequence selected from the group consisting of SEQ ID NOs: 183 and 291.

[0555] In an embodiment of the composition, the CRISPR nuclease has at least 75%, 80%, 85, 90%, 95%, 97%, 98%, 99%, or 100% identity to the amino acid sequence as set forth in SEQ ID NO: 76 or the sequence encoding the CRISPR nuclease has at least a 75%, 80%, 85, 90%, 95%, 97%, 98%, 99%, or 100% sequence identity to a nucleotide sequence selected from the group consisting of SEQ ID NOs: 184 and 292.

[0556] In an embodiment of the composition, the CRISPR nuclease has at least 75%, 80%, 85, 90%, 95%, 97%, 98%, 99%, or 100% identity to the amino acid sequence as set forth in SEQ ID NO: 77 or the sequence encoding the CRISPR nuclease has at least a 75%, 80%, 85, 90%, 95%, 97%, 98%, 99%, or 100% sequence identity to a nucleotide sequence selected from the group consisting of SEQ ID NOs: 185 and 293.

[0557] In an embodiment of the composition, the CRISPR nuclease has at least 75%, 80%, 85, 90%, 95%, 97%, 98%, 99%, or 100% identity to the amino acid sequence as set forth in SEQ ID NO: 78 or the sequence encoding the CRISPR nuclease has at least a 75%, 80%, 85, 90%, 95%, 97%, 98%, 99%, or 100% sequence identity to a nucleotide sequence selected from the group consisting of SEQ ID NOs: 186 and 294.

[0558] In an embodiment of the composition, the CRISPR nuclease has at least 75%, 80%, 85, 90%, 95%, 97%, 98%, 99%, or 100% identity to the amino acid sequence as set forth in SEQ ID NO: 79 or the sequence encoding the CRISPR nuclease has at least a 75%, 80%, 85, 90%, 95%, 97%, 98%, 99%, or 100% sequence identity to a nucleotide sequence selected from the group consisting of SEQ ID NOs: 187 and 295.

[0559] In an embodiment of the composition, the CRISPR nuclease has at least 75%, 80%, 85, 90%, 95%, 97%, 98%, 99%, or 100% identity to the amino acid sequence as set forth in SEQ ID NO: 80 or the sequence encoding the CRISPR nuclease has at least a 75%, 80%, 85, 90%, 95%, 97%, 98%, 99%, or 100% sequence identity to a nucleotide sequence selected from the group consisting of SEQ ID NOs: 188 and 296.

[0560] In an embodiment of the composition, the CRISPR nuclease has at least 75%, 80%, 85, 90%, 95%, 97%, 98%, 99%, or 100% identity to the amino acid sequence as set forth in SEQ ID NO: 81 or the sequence encoding the CRISPR nuclease has at least a 75%, 80%, 85, 90%, 95%, 97%, 98%, 99%, or 100% sequence identity to a nucleotide sequence selected from the group consisting of SEQ ID NOs: 189 and 297.

[0561] In an embodiment of the composition, the CRISPR nuclease has at least 75%, 80%, 85, 90%, 95%, 97%, 98%, 99%, or 100% identity to the amino acid sequence as set forth in SEQ ID NO: 82 or the sequence encoding the CRISPR nuclease has at least a 75%, 80%, 85, 90%, 95%, 97%, 98%, 99%, or 100% sequence identity to a nucleotide sequence selected from the group consisting of SEQ ID NOs: 190 and 298.

[0562] In an embodiment of the composition, the CRISPR nuclease has at least 75%, 80%, 85, 90%, 95%, 97%, 98%, 99%, or 100% identity to the amino acid sequence as set forth in SEQ ID NO: 83 or the sequence encoding the CRISPR nuclease has at least a 75%, 80%, 85, 90%, 95%, 97%, 98%, 99%, or 100% sequence identity to a nucleotide sequence selected from the group consisting of SEQ ID NOs: 191 and 299.

[0563] In an embodiment of the composition, the CRISPR nuclease has at least 75%, 80%, 85, 90%, 95%, 97%, 98%, 99%, or 100% identity to the amino acid sequence as set forth in SEQ ID NO: 84 or the sequence encoding the CRISPR nuclease has at least a 75%, 80%, 85, 90%, 95%, 97%, 98%, 99%, or 100% sequence identity to a nucleotide sequence selected from the group consisting of SEQ ID NOs: 192 and 300.

[0564] In an embodiment of the composition, the CRISPR nuclease has at least 75%, 80%, 85, 90%, 95%, 97%, 98%, 99%, or 100% identity to the amino acid sequence as set forth in SEQ ID NO: 85 or the sequence encoding the CRISPR nuclease has at least a 75%, 80%, 85, 90%, 95%, 97%, 98%, 99%, or 100% sequence identity to a nucleotide sequence selected from the group consisting of SEQ ID NOs: 193 and 301.

[0565] In an embodiment of the composition, the CRISPR nuclease has at least 75%, 80%, 85, 90%, 95%, 97%, 98%, 99%, or 100% identity to the amino acid sequence as set forth in SEQ ID NO: 86 or the sequence encoding the CRISPR nuclease has at least a 75%, 80%, 85, 90%, 95%, 97%, 98%, 99%, or 100% sequence identity to a nucleotide sequence selected from the group consisting of SEQ ID NOs: 194 and 302.

[0566] In an embodiment of the composition, the CRISPR nuclease has at least 75%, 80%, 85, 90%, 95%, 97%, 98%, 99%, or 100% identity to the amino acid sequence as set forth in SEQ ID NO: 87 or the sequence encoding the CRISPR nuclease has at least a 75%, 80%, 85, 90%, 95%, 97%, 98%, 99%, or 100% sequence identity to a nucleotide sequence selected from the group consisting of SEQ ID NOs: 195 and 303.

[0567] In an embodiment of the composition, the CRISPR nuclease has at least 75%, 80%, 85, 90%, 95%, 97%, 98%, 99%, or 100% identity to the amino acid sequence as set forth in SEQ ID NO: 88 or the sequence encoding the CRISPR nuclease has at least a 75%, 80%, 85, 90%, 95%, 97%, 98%, 99%, or 100% sequence identity to a nucleotide sequence selected from the group consisting of SEQ ID NOs: 196 and 304.

[0568] In an embodiment of the composition, the CRISPR nuclease has at least 75%, 80%, 85, 90%, 95%, 97%, 98%, 99%, or 100% identity to the amino acid sequence as set forth in SEQ ID NO: 89 or the sequence encoding the CRISPR nuclease has at least a 75%, 80%, 85, 90%, 95%, 97%, 98%, 99%, or 100% sequence identity to a nucleotide sequence selected from the group consisting of SEQ ID NOs: 197 and 305.

[0569] In an embodiment of the composition, the CRISPR nuclease has at least 75%, 80%, 85, 90%, 95%, 97%, 98%, 99%, or 100% identity to the amino acid sequence as set forth in SEQ ID NO: 90 or the sequence encoding the CRISPR nuclease has at least a 75%, 80%, 85, 90%, 95%, 97%, 98%, 99%, or 100% sequence identity to a nucleotide sequence selected from the group consisting of SEQ ID NOs: 198 and 306.

[0570] In an embodiment of the composition, the CRISPR nuclease has at least 75%, 80%, 85, 90%, 95%, 97%, 98%, 99%, or 100% identity to the amino acid sequence as set forth in SEQ ID NO: 91 or the sequence encoding the CRISPR nuclease has at least a 75%, 80%, 85, 90%, 95%, 97%, 98%, 99%, or 100% sequence identity to a nucleotide sequence selected from the group consisting of SEQ ID NOs: 199 and 307.

[0571] In an embodiment of the composition, the CRISPR nuclease has at least 75%, 80%, 85, 90%, 95%, 97%, 98%, 99%, or 100% identity to the amino acid sequence as set forth in SEQ ID NO: 92 or the sequence encoding the CRISPR nuclease has at least a 75%, 80%, 85, 90%, 95%, 97%, 98%, 99%, or 100% sequence identity to a nucleotide sequence selected from the group consisting of SEQ ID NOs: 200 and 308.

[0572] In an embodiment of the composition, the CRISPR nuclease has at least 75%, 80%, 85, 90%, 95%, 97%, 98%, 99%, or 100% identity to the amino acid sequence as set forth in SEQ ID NO: 93 or the sequence encoding the CRISPR nuclease has at least a 75%, 80%, 85, 90%, 95%, 97%, 98%, 99%, or 100% sequence identity to a nucleotide sequence selected from the group consisting of SEQ ID NOs: 201 and 309.

[0573] In an embodiment of the composition, the CRISPR nuclease has at least 75%, 80%, 85, 90%, 95%, 97%, 98%, 99%, or 100% identity to the amino acid sequence as set forth in SEQ ID NO: 94 or the sequence encoding the CRISPR nuclease has at least a 75%, 80%, 85, 90%, 95%, 97%, 98%, 99%, or 100% sequence identity to a nucleotide sequence selected from the group consisting of SEQ ID NOs: 202 and 310.

[0574] In an embodiment of the composition, the CRISPR nuclease has at least 75%, 80%, 85, 90%, 95%, 97%, 98%, 99%, or 100% identity to the amino acid sequence as set forth in SEQ ID NO: 95 or the sequence encoding the CRISPR nuclease has at least a 75%, 80%, 85, 90%, 95%, 97%, 98%, 99%, or 100% sequence identity to a nucleotide sequence selected from the group consisting of SEQ ID NOs: 203 and 311.

[0575] In an embodiment of the composition, the CRISPR nuclease has at least 75%, 80%, 85, 90%, 95%, 97%, 98%, 99%, or 100% identity to the amino acid sequence as set forth in SEQ ID NO: 96 or the sequence encoding the CRISPR nuclease has at least a 75%, 80%, 85, 90%, 95%, 97%, 98%, 99%, or 100% sequence identity to a nucleotide sequence selected from the group consisting of SEQ ID NOs: 204 and 312.

[0576] In an embodiment of the composition, the CRISPR nuclease has at least 75%, 80%, 85, 90%, 95%, 97%, 98%, 99%, or 100% identity to the amino acid sequence as set forth in SEQ ID NO: 97 or the sequence encoding the CRISPR nuclease has at least a 75%, 80%, 85, 90%, 95%, 97%, 98%, 99%, or 100% sequence identity to a nucleotide sequence selected from the group consisting of SEQ ID NOs: 205 and 313.

[0577] In an embodiment of the composition, the CRISPR nuclease has at least 75%, 80%, 85, 90%, 95%, 97%, 98%, 99%, or 100% identity to the amino acid sequence as set forth in SEQ ID NO: 98 or the sequence encoding the CRISPR nuclease has at least a 75%, 80%, 85, 90%, 95%, 97%, 98%, 99%, or 100% sequence identity to a nucleotide sequence selected from the group consisting of SEQ ID NOs: 206 and 314.

[0578] In an embodiment of the composition, the CRISPR nuclease has at least 75%, 80%, 85, 90%, 95%, 97%, 98%, 99%, or 100% identity to the amino acid sequence as set forth in SEQ ID NO: 99 or the sequence encoding the CRISPR nuclease has at least a 75%, 80%, 85, 90%, 95%, 97%, 98%, 99%, or 100% sequence identity to a nucleotide sequence selected from the group consisting of SEQ ID NOs: 207 and 315.

[0579] In an embodiment of the composition, the CRISPR nuclease has at least 75%, 80%, 85, 90%, 95%, 97%, 98%, 99%, or 100% identity to the amino acid sequence as set forth in SEQ ID NO: 100 or the sequence encoding the CRISPR nuclease has at least a 75%, 80%, 85, 90%, 95%, 97%, 98%, 99%, or 100% sequence identity to a nucleotide sequence selected from the group consisting of SEQ ID NOs: 208 and 316.

[0580] In an embodiment of the composition, the CRISPR nuclease has at least 75%, 80%, 85, 90%, 95%, 97%, 98%, 99%, or 100% identity to the amino acid sequence as set forth in SEQ ID NO: 101 or the sequence encoding the CRISPR nuclease has at least a 75%, 80%, 85, 90%, 95%, 97%, 98%, 99%, or 100% sequence identity to a nucleotide sequence selected from the group consisting of SEQ ID NOs: 209 and 317.

[0581] In an embodiment of the composition, the CRISPR nuclease has at least 75%, 80%, 85, 90%, 95%, 97%, 98%, 99%, or 100% identity to the amino acid sequence as set forth in SEQ ID NO: 102 or the sequence encoding the CRISPR nuclease has at least a 75%, 80%, 85, 90%, 95%, 97%, 98%, 99%, or 100% sequence identity to a nucleotide sequence selected from the group consisting of SEQ ID NOs: 210 and 318.

[0582] In an embodiment of the composition, the CRISPR nuclease has at least 75%, 80%, 85, 90%, 95%, 97%, 98%, 99%, or 100% identity to the amino acid sequence as set forth in SEQ ID NO: 103 or the sequence encoding the CRISPR nuclease has at least a 75%, 80%, 85, 90%, 95%, 97%, 98%, 99%, or 100% sequence identity to a nucleotide sequence selected from the group consisting of SEQ ID NOs: 211 and 319.

[0583] In an embodiment of the composition, the CRISPR nuclease has at least 75%, 80%, 85, 90%, 95%, 97%, 98%, 99%, or 100% identity to the amino acid sequence as set forth in SEQ ID NO: 104 or the sequence encoding the CRISPR nuclease has at least a 75%, 80%, 85, 90%, 95%, 97%, 98%, 99%, or 100% sequence identity to a nucleotide sequence selected from the group consisting of SEQ ID NOs: 212 and 320.

[0584] In an embodiment of the composition, the CRISPR nuclease has at least 75%, 80%, 85, 90%, 95%, 97%, 98%, 99%, or 100% identity to the amino acid sequence as set forth in SEQ ID NO: 105 or the sequence encoding the CRISPR nuclease has at least a 75%, 80%, 85, 90%, 95%, 97%, 98%, 99%, or 100% sequence identity to a nucleotide sequence selected from the group consisting of SEQ ID NOs: 213 and 321.

[0585] In an embodiment of the composition, the CRISPR nuclease has at least 75%, 80%, 85, 90%, 95%, 97%, 98%, 99%, or 100% identity to the amino acid sequence as set forth in SEQ ID NO: 106 or the sequence encoding the CRISPR nuclease has at least a 75%, 80%, 85, 90%, 95%, 97%, 98%, 99%, or 100% sequence identity to a nucleotide sequence selected from the group consisting of SEQ ID NOs: 214 and 322.

[0586] In an embodiment of the composition, the CRISPR nuclease has at least 75%, 80%, 85, 90%, 95%, 97%, 98%, 99%, or 100% identity to the amino acid sequence as set forth in SEQ ID NO: 107 or the sequence encoding the CRISPR nuclease has at least a 75%, 80%, 85, 90%, 95%, 97%, 98%, 99%, or 100% sequence identity to a nucleotide sequence selected from the group consisting of SEQ ID NOs: 215 and 323.

[0587] In an embodiment of the composition, the CRISPR nuclease has at least 75%, 80%, 85, 90%, 95%, 97%, 98%, 99%, or 100% identity to the amino acid sequence as set forth in SEQ ID NO: 108 or the sequence encoding the CRISPR nuclease has at least a 75%, 80%, 85, 90%, 95%, 97%, 98%, 99%, or 100% sequence identity to a nucleotide sequence selected from the group consisting of SEQ ID NOs: 216 and 324.

[0588] According to some embodiments, there is provided an engineered or non-naturally occurring composition comprising a CRISPR nuclease comprising a sequence having at least 100%, 99%, 98%, 97%, 96%, 95%, 94%, 93%, 92%, 91%, 90%, 85%, 80% identity to the amino acid sequence selected from the group consisting of SEQ ID NOs: 1-108 or a nucleic acid molecule comprising a sequence encoding the CRISPR nuclease. Each possibility represents a separate embodiment.

[0589] In an embodiment, the CRISPR nuclease is engineered or non-naturally occurring. The CRISPR nuclease may also be recombinant. Such CRISPR nucleases are produced using laboratory methods (molecular cloning) to bring together genetic material from multiple sources, creating sequences that would not otherwise be found in biological organisms.

[0590] In an embodiment, the CRISPR nuclease of the invention exhibits increased specificity to a target site compared to a SpCas9 nuclease when complexed with the one or more RNA molecules.

[0591] In an embodiment, the complex of the CRISPR nuclease of the invention and one or more RNA molecules exhibits at least maintained on-target editing activity of the target site and reduced off-target activity compared to SpCas9 nuclease.

[0592] In an embodiment, the CRISPR nuclease further comprises an RNA-binding portion capable of interacting with a DNA-targeting RNA molecule (gRNA) and an activity portion that exhibits site-directed enzymatic activity.

[0593] In an embodiment, the composition further comprises a DNA-targeting RNA molecule or a DNA polynucleotide encoding a DNA-targeting RNA molecule, wherein the DNA-targeting RNA molecule comprises a guide sequence portion, i.e. a nucleotide sequence that is complementary to a sequence in a target region, wherein the DNA-targeting RNA molecule and the CRISPR nuclease do not naturally occur together.

[0594] In an embodiment, the DNA-targeting RNA molecule further comprises a nucleotide sequence that can form a complex with a CRISPR nuclease.

[0595] This invention also provides a non-naturally occurring composition comprising a CRISPR associated system comprising:
[0596] a) one or more RNA molecules comprising a guide sequence portion linked to a direct repeat sequence, wherein the guide sequence is capable of hybridizing with a target sequence, or one or more nucleotide sequences encoding the one or more RNA molecules; and
[0597] b) a CRISPR nuclease comprising an amino acid sequence having at least 95% identity to the amino acid sequence selected from the group consisting of SEQ ID NOs: 1-108 or a nucleic acid molecule comprising a sequence encoding the CRISPR nuclease; wherein the one or more RNA molecules hybridize to the target sequence, wherein the target sequence is 3′ of a Protospacer Adjacent Motif (PAM), and the one or more RNA molecules form a complex with the RNA-guided nuclease.

[0598] In an embodiment, the composition further comprises an RNA molecule comprising a nucleotide sequence that can form a complex with a CRISPR nuclease (e.g. a tracrRNA molecule) or a DNA polynucleotide comprising a sequence encoding an RNA molecule that can form a complex with the CRISPR nuclease.

[0599] In an embodiment, the composition further comprises a donor template for homology directed repair (HDR).

[0600] In an embodiment, the composition is capable of editing the target region in the genome of a cell.

[0601] According to some embodiments, there is provided a non-naturally occurring composition comprising:
[0602] (a) a CRISPR nuclease, or a polynucleotide encoding the CRISPR nuclease, comprising:
   [0603] an RNA-binding portion; and
   [0604] an activity portion that exhibits site-directed enzymatic activity, wherein the CRISPR nuclease has at least 100%, 99%, 98%, 97%, 96%, 95%, 94%, 93%, 92%, 91%, 90%, 85%, 80% identity to any of SEQ ID NOs: 1-108; and
[0605] (b) one or more RNA molecules or a DNA polynucleotide encoding the one or more RNA molecules comprising:
   [0606] i) a DNA-targeting RNA sequence, comprising a nucleotide sequence that is complementary to a sequence in a target DNA sequence; and
   [0607] ii) a protein-binding RNA sequence, capable of interacting with the RNA-binding portion of the CRISPR nuclease,
[0608] wherein the DNA targeting RNA sequence and the CRISPR nuclease do not naturally occur together. Each possibility represents a separate embodiment.

[0609] In some embodiments, there is provided a single RNA molecule comprising the DNA-targeting RNA sequence and the protein-binding RNA sequence, wherein the RNA molecule can form a complex with the CRISPR nuclease and serve as the DNA targeting module. In some embodiments, the RNA molecule has a length of up to 1000 bases, 900 bases, 800 bases, 700 bases, 600 bases, 500 bases, 400 bases, 300 bases, 200 bases, 100 bases, 50 bases. Each possibility represents a separate embodiment. In some embodiments, a first RNA molecule comprising the DNA-targeting RNA sequence and a second RNA molecule comprising the protein-binding RNA sequence interact by base pairing or alternatively fused together to form one or more RNA molecules that complex with the CRISPR nuclease and serve as the DNA targeting module.

[0610] This invention also provides a non-naturally occurring composition comprising:
[0611] a) a CRISPR nuclease comprising a sequence having at least 95% identity to the amino acid sequence selected from the group consisting of SEQ ID NOs: 1-108 or a nucleic acid molecule comprising a sequence encoding the CRISPR nuclease; and
[0612] b) one or more RNA molecules, or one or more DNA polynucleotide encoding the one or more RNA molecules, comprising at least one of:
   [0613] i) a nuclease-binding RNA nucleotide sequence capable of interacting with/binding to the CRISPR nuclease; and
   [0614] ii) a DNA-targeting RNA nucleotide sequence comprising a sequence complementary to a sequence in a target DNA sequence,
[0615] wherein the CRISPR nuclease is capable of complexing with the one or more RNA molecules to form a complex capable of hybridizing with the target DNA sequence.

[0616] In an embodiment, the CRISPR nuclease and the one or more RNA molecules form a CRISPR complex that is capable of binding to the target DNA sequence to effect cleavage of the target DNA sequence.

[0617] In an embodiment, the CRISPR nuclease and at least one of the one or more RNA molecules do not naturally occur together.

[0618] In an embodiment:
[0619] a) the CRISPR nuclease comprises an RNA-binding portion and an activity portion that exhibits site-directed enzymatic activity;
[0620] b) the DNA-targeting RNA nucleotide sequence comprises a nucleotide sequence that is complementary to a sequence in a target DNA sequence; and
[0621] c) the nuclease-binding RNA nucleotide sequence comprises a sequence that interacts with the RNA-binding portion of the CRISPR nuclease.

[0622] In an embodiment, the nuclease-binding RNA nucleotide sequence and the DNA-targeting RNA nucleotide sequence are on a single guide RNA molecule (sgRNA), wherein the sgRNA molecule can form a complex with the CRISPR nuclease and serve as the DNA targeting module.

[0623] In an embodiment, the nuclease-binding RNA nucleotide sequence is on a first RNA molecule and the DNA-targeting RNA nucleotide sequence is on a second RNA molecule, and wherein the first and second RNA molecules interact by base-pairing or are fused together to form a RNA complex or sgRNA that forms a complex with the CRISPR nuclease and serves as a DNA targeting module.

[0624] In an embodiment, the sgRNA has a length of up to 1000 bases, 900 bases, 800 bases, 700 bases, 600 bases, 500 bases, 400 bases, 300 bases, 200 bases, 100 bases, 50 bases.

[0625] In an embodiment, the composition further comprises a donor template for homology directed repair (HDR).

[0626] In an embodiment, the CRISPR nuclease is non-naturally occurring.

[0627] In an embodiment, the CRISPR nuclease is engineered and comprises unnatural or synthetic amino acids.

[0628] In an embodiment, the CRISPR nuclease is engineered and comprises one or more of a nuclear localization sequences (NLS), cell penetrating peptide sequences, and/or affinity tags.

[0629] In an embodiment, the CRISPR nuclease comprises one or more nuclear localization sequences of sufficient strength to drive accumulation of a CRISPR complex comprising the CRISPR nuclease in a detectable amount in the nucleus of a eukaryotic cell.

[0630] This invention also provides a method of modifying a nucleotide sequence at a target site in a cell-free system or the genome of a cell comprising introducing into the cell any of the compositions of the invention.

[0631] In an embodiment, the cell is a eukaryotic cell.

[0632] In another embodiment, the cell is a prokaryotic cell.

[0633] In some embodiments, the one or more RNA molecules further comprises an RNA sequence comprising a nucleotide molecule that can form a complex with the RNA nuclease (tracrRNA) or a DNA polynucleotide encoding an RNA molecule comprising a nucleotide sequence that can form a complex with the CRISPR nuclease.

[0634] In an embodiment, the CRISPR nuclease comprises 1, 2, 3, 4, 5, 6, 7, 8, 9, 10, or more NLSs at or near the amino-terminus, 1, 2, 3, 4, 5, 6, 7, 8, 9, 10, or more NLSs at or near carboxy-terminus, or a combination of 1, 2, 3, 4, 5, 6, 7, 8, 9, 10, or more NLSs at or near the amino-terminus and 1, 2, 3, 4, 5, 6, 7, 8, 9, 10, or more NLSs at or near carboxy-terminus. In an embodiment 1-4 NLSs are fused with the CRISPR nuclease. In an embodiment, an NLS is located within the open-reading frame (ORF) of the CRISPR nuclease.

[0635] Methods of fusing an NLS at or near the amino-terminus, at or near carboxy-terminus, or within the ORF of an expressed protein are well known in the art. As an example, to fuse an NLS to the amino-terminus of a CRISPR nuclease, the nucleic acid sequence of the NLS is placed immediately after the start codon of the CRISPR nuclease on the nucleic acid encoding the NLS-fused CRISPR nuclease. Conversely, to fuse an NLS to the carboxy-terminus of a CRISPR nuclease the nucleic acid sequence of the NLS is placed after the codon encoding the last amino acid of the CRISPR nuclease and before the stop codon.

[0636] Any combination of NLSs, cell penetrating peptide sequences, and/or affinity tags at any position along the ORF of the CRISPR nuclease is contemplated in this invention.

[0637] The amino acid sequences and nucleic acid sequences of the CRISPR nucleases provided herein may include NLS and/or TAGs inserted so as to interrupt the contiguous amino acid or nucleic acid sequences of the CRISPR nucleases.

[0638] In an embodiment, the one or more NLSs are in tandem repeats.

[0639] In an embodiment, the one or more NLSs are considered in proximity to the N- or C-terminus when the nearest amino acid of the NLS is within about 1, 2, 3, 4, 5, 10, 15, 20, 25, 30, 40, 50, or more amino acids along the polypeptide chain from the N- or C-terminus.

[0640] As discussed, the CRISPR nuclease may be engineered to comprise one or more of a nuclear localization sequences (NLS), cell penetrating peptide sequences, and/or affinity tags.

[0641] In an embodiment, the CRISPR nuclease exhibits increased specificity to a target site compared to the wild-type of the CRISPR nuclease when complexed with the one or more RNA molecules.

[0642] In an embodiment, the complex of the CRISPR nuclease and one or more RNA molecules exhibits at least maintained on-target editing activity of the target site and reduced off-target activity compared to the wild-type of the CRISPR nuclease.

[0643] In an embodiment, the composition further comprises a recombinant nucleic acid molecule comprising a heterologous promoter operably linked to the nucleotide acid molecule comprising the sequence encoding the CRISPR nuclease.

[0644] In an embodiment, the CRISPR nuclease or nucleic acid molecule comprising a sequence encoding the CRISPR nuclease is non-naturally occurring or engineered.

[0645] This invention also provides a non-naturally occurring or engineered composition comprising a vector system comprising the nucleic acid molecule comprising a sequence encoding any of the CRISPR nucleases of the invention.

[0646] This invention also provides use of any of the compositions of the invention for the treatment of a subject afflicted with a disease associated with a genomic mutation comprising modifying a nucleotide sequence at a target site in the genome of the subject.

[0647] This invention provides a method of modifying a nucleotide sequence at a target site in the genome of a mammalian cell comprising introducing into the cell (i) a composition comprising a CRISPR nuclease having at least 95% identity to an amino acid sequence selected from the group consisting of SEQ ID NOs: 1-108 or a nucleic acid molecule comprising a sequence encoding a CRISPR nuclease which sequence has at least 95% identity to a nucleic acid sequence selected from the group consisting of SEQ ID NOs: 109-324 and (ii) a DNA-targeting RNA molecule, or a DNA polynucleotide encoding a DNA-targeting RNA molecule, comprising a nucleotide sequence that is complementary to a sequence in the target DNA.

[0648] In some embodiments, the method is performed ex vivo. In some embodiments, the method is performed in vivo. In some embodiments, some steps of the method are performed ex vivo and some steps are performed in vivo. In some embodiments the mammalian cell is a human cell.

[0649] In an embodiment, the method further comprises introducing into the cell: (iii) an RNA molecule comprising a tracrRNA sequence or a DNA polynucleotide encoding an RNA molecule comprising a tracrRNA sequence.

[0650] In an embodiment, the DNA-targeting RNA molecule comprises a crRNA repeat sequence.

[0651] In an embodiment, the RNA molecule comprising a tracrRNA sequence is able to bind the DNA-targeting RNA molecule.

[0652] In an embodiment, the DNA-targeting RNA molecule and the RNA molecule comprising a tracrRNA sequence interact to form an RNA complex, and the RNA complex is capable of forming an active complex with the CRISPR nuclease.

[0653] In an embodiment, the DNA-targeting RNA molecule and the RNA molecule comprising a nuclease-binding RNA sequence are fused in the form of a single guide RNA molecule that is suitable to form an active complex with the CRISPR nuclease.

[0654] In an embodiment, the guide sequence portion comprises a sequence complementary to a protospacer sequence.

[0655] In an embodiment, the CRISPR nuclease forms a complex with the DNA-targeting RNA molecule and effects a double strand break in a region that is 3′ or 5′ of a Protospacer Adjacent Motif (PAM).

[0656] In an embodiment of any of the methods described herein, the method is for treating a subject afflicted with a disease associated with a genomic mutation comprising modifying a nucleotide sequence at a target site in the genome of the subject.

[0657] In an embodiment, the method comprises first selecting a subject afflicted with a disease associated with a genomic mutation and obtaining the cell from the subject.

[0658] This invention also provides a modified cell or cells obtained by any of the methods described herein. In an embodiment these modified cell or cells are capable of giving rise to progeny cells. In an embodiment these modified cell or cells are capable of giving rise to progeny cells after engraftment.

[0659] This invention also provides a composition comprising these modified cells and a pharmaceutically acceptable carrier. Also provided is an in vitro or ex vivo method of preparing this, comprising mixing the cells with the pharmaceutically acceptable carrier.

### DNA-Targeting RNA Molecules

[0660] The “guide sequence portion” of an RNA molecule refers to a nucleotide sequence that is capable of hybridizing to a specific target DNA sequence, e.g., the guide sequence portion has a nucleotide sequence which is partially or fully complementary to the DNA sequence being targeted along the length of the guide sequence portion. In some embodiments, the guide sequence portion is 17, 18, 19, 20, 21, 22, 23, 24, 25, 26, 27, 28, 29, 30, 31, 32, 33, 34, 35, 36, 37, 38, 39, 40, 41, 42, 43, 44, 45, 46, 47, 48, 49 or 50 nucleotides in length, or approximately 17-50, 17-49, 17-48, 17-47, 17-46, 17-45, 17-44, 17-43, 17-42, 17-41, 17-40, 17-39, 17-38, 17-37, 17-36, 17-35, 17-34, 17-33, 17-31, 17-30, 17-29, 17-28, 17-27, 17-26, 17-25, 17-24, 17-22, 17-21, 18-25, 18-24, 18-23, 18-22, 18-21, 19-25, 19-24, 19-23, 19-22, 19-21, 19-20, 20-22, 18-20, 20-21, 21-22, or 17-20 nucleotides in length. The entire length of the guide sequence portion is fully complementary to the DNA sequence being targeted along the length of the guide sequence portion. The guide sequence portion may be part of an RNA molecule that can form a complex with a CRISPR nuclease with the guide sequence portion serving as the DNA targeting portion of the CRISPR complex. When the DNA molecule having the guide sequence portion is present contemporaneously with the CRISPR molecule the RNA molecule is capable of targeting the CRISPR nuclease to the specific target DNA sequence. Each possibility represents a separate embodiment. An RNA molecule can be custom designed to target any desired sequence. Accordingly, a molecule comprising a “guide sequence portion” is a type of targeting molecule. Throughout this application, the terms “guide molecule,” “RNA guide molecule,” “guide RNA molecule,” and “gRNA molecule” are synonymous with a molecule comprising a guide sequence portion, and the term “spacer” is synonymous with a “guide sequence portion.”

[0661] In embodiments of the present invention, the CRISPR nuclease has its greatest cleavage activity when used with an RNA molecule comprising a guide sequence portion having 17, 18, 19 20, 21, 22, 23, 24, 25, 26, 27, 28, 29, or 30 nucleotides.

[0662] A single-guide RNA (sgRNA) molecule may be used to direct a CRISPR nuclease to a desired target site. The single-guide RNA comprises a guide sequence portion as well as a scaffold portion. The scaffold portion interacts with a CRISPR nuclease and, together with a guide sequence portion, activates and targets the CRISPR nuclease to a desired target site. A scaffold portion may be further engineered, for example, to have a reduced size.

[0663] According to some aspects of the invention, the disclosed methods comprise a method of modifying a nucleotide sequence at a target site in a cell-free system or the genome of a cell comprising introducing into the cell the composition of any one of the embodiments described herein.

[0664] In some embodiments, the cell is a eukaryotic cell, preferably a mammalian cell or a plant cell.

[0665] According to some aspects of the invention, the disclosed methods comprise a use of any one of the compositions described herein for the treatment of a subject afflicted with a disease associated with a genomic mutation comprising modifying a nucleotide sequence at a target site in the genome of the subject.

[0666] According to some aspects of the invention, the disclosed methods comprise a method of treating subject having a mutation disorder comprising targeting any one of the compositions described herein to an allele associated with the mutation disorder.

[0667] In some embodiments, the mutation disorder is related to a disease or disorder selected from any of a neoplasia, age-related macular degeneration, schizophrenia, neurological, neurodegenerative, or movement disorder, Fragile X Syndrome, secretase-related disorders, prion-related disorders, ALS, addiction, autism, Alzheimer's Disease, neutropenia, inflammation-related disorders, Parkinson's Disease, blood and coagulation diseases and disorders, beta thalassemia, sickle cell anemia, cell dysregulation and oncology diseases and disorders, inflammation and immune-related diseases and disorders, metabolic, liver, kidney and protein diseases and disorders, muscular and skeletal diseases and disorders, dermatological diseases and disorders, neurological and neuronal diseases and disorders, and ocular diseases and disorders.

### Diseases and Therapies

[0668] Certain embodiments of the invention target a nuclease to a specific genetic locus associated with a disease or disorder as a form of gene editing, method of treatment, or therapy. For example, to induce editing or knockout of a gene, a novel nuclease disclosed herein may be specifically targeted to a pathogenic mutant allele of the gene using a custom designed guide RNA molecule. The guide RNA molecule is preferably designed by first considering the PAM requirement of the nuclease, which as shown herein is also dependent on the system in which the gene editing is being performed. For example, a guide RNA molecule designed to target an OMNI-263 nuclease to a target site is designed to contain a spacer region complementary to a DNA strand of a DNA double-stranded region that neighbors a OMNI-263 PAM sequence, e.g. “NNNRCM” or “NNNRCC.” The guide RNA molecule is further preferably designed to contain a spacer region (i.e. the region of the guide RNA molecule having complementarity to the target allele) of sufficient and preferably optimal length in order to increase specific activity of the nuclease and reduce off-target effects.

[0669] As a non-limiting example, the guide RNA molecule may be designed to target the nuclease to a specific region of a mutant allele, e.g. near the start codon, such that upon DNA damage caused by the nuclease a non-homologous end joining (NHEJ) pathway is induced and leads to silencing of the mutant allele by introduction of frameshift mutations. This approach to guide RNA molecule design is particularly useful for altering the effects of dominant negative mutations and thereby treating a subject. As a separate non-limiting example, the guide RNA molecule may be designed to target a specific pathogenic mutation of a mutated allele, such that upon DNA damage caused by the nuclease a homology directed repair (HDR) pathway is induced and leads to template mediated correction of the mutant allele. This approach to guide RNA molecule design is particularly useful for altering haploinsufficiency effects of a mutated allele and thereby treating a subject.

[0670] Non-limiting examples of specific genes which may be targeted for alteration to treat a disease or disorder are presented herein below. Specific disease-associated genes and mutations that induce a mutation disorder are described in the literature. Such mutations can be used to design a DNA-targeting RNA molecule to target a CRISPR composition to an allele of the disease associated gene, where the CRISPR composition causes DNA damage and induces a DNA repair pathway to alter the allele and thereby treat the mutation disorder.

[0671] Mutations in the ELANE gene are associated with neutropenia. Accordingly, without limitation, embodiments of the invention that target ELANE may be used in methods of treating subjects afflicted with neutropenia.

[0672] CXCR4 is a co-receptor for the human immunodeficiency virus type 1 (HIV-1) infection. Accordingly, without limitation, embodiments of the invention that target CXCR4 may be used in methods of treating subjects afflicted with HIV-1 or conferring resistance to HIV-1 infection in a subject.

[0673] Programmed cell death protein 1 (PD-1) disruption enhances CAR-T cell mediated killing of tumor cells and PD-1 may be a target in other cancer therapies. Accordingly, without limitation, embodiments of the invention that target PD-1 may be used in methods of treating subjects afflicted with cancer. In an embodiment, the treatment is CAR-T cell therapy with T cells that have been modified according to the invention to be PD-1 deficient.

[0674] In addition, BCL11A is a gene that plays a role in the suppression of hemoglobin production. Globin production may be increased to treat diseases such as thalassemia or sickle cell anemia by inhibiting BCL11A. See for example, PCT International Publication No. WO 2017/077394A2; U.S. Publication No. US2011/0182867A1; Humbert et al. Sci. Transl. Med. (2019); and Canver et al. Nature (2015). Accordingly, without limitation, embodiments of the invention that target an enhancer of BCL11A may be used in methods of treating subjects afflicted with beta thalassemia or sickle cell anemia.

[0675] Embodiments of the invention may also be used for targeting any disease-associated gene, for studying, altering, or treating any of the diseases or disorders listed in Table A or Table B below. Indeed, any disease-associated gene may be studied, altered, or targeted by any one of the nucleases disclosed herein to treat the disease caused by the disease-associated gene. Non-limiting examples are those listed in U.S. Publication No. 2018/0282762A1 and European Patent No. EP3079726B1.

TABLE A
Diseases, Disorders and their associated genes

| DISEASE/DISORDERS | GENE(S) |
|---|---|
| Neoplasia | PTEN; ATM; ATR; EGFR; ERBB2; ERBB3; ERBB4; Notch1; |
| | Notch2; Notch3; Notch4; AKT; AKT2; AKT3; HIF; HIF1a; |
| | HIF3a; Met; HRG; Bcl2; PPAR alpha; PPAR gamma; WT1 |
| | (Wilms Tumor); FGF Receptor Family members (5 members: 1, |
| | 2, 3, 4, 5); CDKN2a; APC; RB (retinoblastoma); MEN1; VHL; |
| | BRCA1; BRCA2; AR (Androgen Receptor); TSG101; IGF; IGF |
| | Receptor; Igf1 (4 variants); gf2 (3 variants); Igf 1 Receptor; Igf 2 |
| | Receptor; Bax; Bcl2; caspases family (9 members: 1, 2, 3, 4, 6, |
| | 7, 8, 9, 12); Kras; Apc |
| Age-related Macular | Abcr; Ccl2; Cc2; cp (ceruloplasmin); Timp3; cathepsinD; Vldlr; |
| Degeneration | Ccr2 |
| Schizophrenia | Neuregulin1 (Nrg1); Erb4 (receptor for Neuregulin); |
| | Complexin1 (Cp1x1); Tph1 Tryptophan hydroxylase; Tph2 |
| | Tryptophan hydroxylase 2; Neurexin 1; GSK3; GSK3a; GSK3b |
| Neurological, Neuro | 5-HTT (S1c6a4); COMT; DRD (Drd1a); SLC6A3; DAOA; |
| degenerative, and | DTNBP1; Dao (Dao1) |
| Movement Disorders | |
| Trinucleotide Repeat | HTT (Huntington's Dx); SBMA/SMAX1/AR (Kennedy's Dx); |
| Disorders | FXN/X25 (Friedrich's Ataxia); ATX3 (Machado-Joseph's Dx); |
| | ATXN1 and ATXN2 (spinocerebellar ataxias); DMPK |
| | (myotonic dystrophy); Atrophin-1 and Atn1 (DRPLA Dx); CBP |
| | (Creb-BP - global instability); VLDLR (Alzheimer's); Atxn7; |
| | Atxn10 |
| Fragile X Syndrome | FMR2; FXR1; FXR2; mGLUR5 |
| Secretase Related | APH-1 (alpha and beta); Presenilin (Psen1); nicastrin (Ncstn); |
| Disorders | PEN-2 |
| Others | Nos1; Parp1; Nat1; Nat2 |
| Prion related disorders | Prp |
| ALS | SOD1; ALS2; STEX; FUS; TARDBP; VEGF (VEGF-a; |
| | VEGF-b; VEGF-c) |
| Addiction | Prkce (alcohol); Drd2; Drd4; ABAT (alcohol); GRIA2; Grm5; |
| | Grin1; Htr1b; Grin2a; Drd3; Pdyn; Gria1 (alcohol) |
| Autism | Mecp2; BZRAP1; MDGA2; Sema5A; Neurexin 1; Fragile X |
| | (FMR2 (AFF2); FXR1; FXR2; Mglur5) |
| Alzheimer's Disease | E1; CHIP; UCH; UBB; Tau; LRP; PICALM; Clusterin; PS1; |
| | SORL1; CR1; Vldlr; Uba1; Uba3; CHIP28 (Aqp1, Aquaporin |
| | 1); Uchl1; Uchl3; APP |
| Inflammation | IL-10; IL-1 (IL-la; IL-1b); IL-13; IL-17 (IL-17a (CTLA8); IL- |
| | 17b; IL-17c; IL-17d; IL-17f); II-23; Cx3cr1; ptpn22; TNFa; |
| | NOD2/CARD15 for IBD; IL-6; IL-12 (IL-12a; IL-12b); CTLA4; |
| | Cx3cl1 |
| Parkinson's Disease | x-Synuclein; DJ-1; LRRK2; Parkin; PINK1 |

TABLE B
Diseases, Disorders and their associated genes

| DISEASE CATEGORY | DISEASE AND ASSOCIATED GENES |
|---|---|
| Blood and coagulation | Anemia (CDAN1, CDA1, RPS19, DBA, PKLR, PK1, NT5C3, |
| diseases and disorders | UMPH1, PSN1, RHAG, RH50A, NRAMP2, SPTB, ALAS2, |
| | ANH1, ASB, ABCB7, ABC7, ASAT); Bare lymphocyte |
| | syndrome (TAPBP, TPSN, TAP2, ABCB3, PSF2, RING11, |
| | MHC2TA, C2TA, RFX5, RFXAP, RFX5), Bleeding disorders |
| | (TBXA2R, P2RX1, P2X1); Factor H and factor H-like 1 (HF1, |
| | CFH, HUS); Factor V and factor VIII (MCFD2); Factor VII |
| | deficiency (F7); Factor X deficiency (F10); Factor XI deficiency |
| | (F11); Factor XII deficiency (F12, HAF); Factor XIIIA |
| | deficiency (F13A1, F13A); Factor XIIIB deficiency (F13B); |
| | Fanconi anemia (FANCA, FACA, FA1, FA, FAA, FAAP95, |
| | FAAP90, FLJ34064, FANCB, FANCC, FACC, BRCA2, |
| | FANCD1, FANCD2, FANCD, FACD, FAD, FANCE, FACE, |
| | FANCF, XRCC9, FANCG, BRIP1, BACH1, FANCJ, PHF9, |
| | FANCL, FANCM, KIAA1596); Hemophagocytic |
| | lymphohistiocytosis disorders (PRF1, HPLH2, UNC13D, |
| | MUNC13-4, HPLH3, HLH3, FHL3); Hemophilia A (F8, F8C, |
| | HEMA); Hemophilia B (F9, HEMB), Hemorrhagic disorders |
| | (PI, ATT, F5); Leukocyde deficiencies and disorders (ITGB2, |
| | CD18, LCAMB, LAD, EIF2B1, EIF2BA, EIF2B2, EIF2B3, |
| | EIF2B5, LVWM, CACH, CLE, EIF2B4); Sickle cell anemia |
| | (HBB); Thalassemia (HBA2, HBB, HBD, LCRB, HBA1) |
| Cell dysregulation and | B-cell non-Hodgkin lymphoma (BCL7A, BCL7); Leukemia |
| oncology diseases and | (TAL1, TCL5, SCL, TAL2, FLT3, NBS1, NBS, ZNFN1A1, |
| disorders | IK1, LYF1, HOXD4, HOX4B, BCR, CML, PHL, ALL, ARNT, |
| | KRAS2, RASK2, GMPS, AF10, ARHGEF12, LARG, |
| | KIAA0382, CALM, CLTH, CEBPA, CEBP, CHIC2, BTL, |
| | FLT3, KIT, PBT, LPP, NPM1, NUP214, D9S46E, CAN, CAIN, |
| | RUNX1, CBFA2, AML1, WHSC1L1, NSD3, FLT3, AF1Q, |
| | NPM1, NUMA1, ZNF145, PLZF, PML, MYL, STAT5B, AF10, |
| | CALM, CLTH, ARL11, ARLTS1, P2RX7, P2X7, BCR, CML, |
| | PHL, ALL, GRAF, NF1, VRNF, WSS, NENS, PTPN11, |
| | PTP2C, SHP2, NS1, BCL2, CCND1, PRAD1, BCL1, TCRA, |
| | GATA1, GF1, ERYF1, NFE1, ABL1, NQO1, DIA4, NMOR1, |
| | NUP214, D9S46E, CAN, CAIN) |
| Inflammation and immune | AIDS (KIR3DL1, NKAT3, NKB1, AMB11, KIR3DS1, IFNG, |
| related diseases and | CXCL12, SDF1); Autoimmune lymphoproliferative syndrome |
| disorders | (TNFRSF6, APT1, FAS, CD95, ALPS1A); Combined |
| | immunodeficiency, (IL2RG, SCIDX1, SCIDX, IMD4); HIV-1 |
| | (CCL5, SCYA5, D17S136E, TCP228), HIV susceptibility or |
| | infection (IL10, CSIF, CMKBR2, CCR2, CMKBR5, CCCKR5 |
| | (CCR5)); Immunodeficiencies (CD3E, CD3G, AICDA, AID, |
| | HIGM2, TNFRSF5, CD40, UNG, DGU, HIGM4, TNFSF5, |
| | CD40LG, HIGM1, IGM, FOXP3, IPEX, AIID, XPID, PIDX, |
| | TNFRSF14B, TACI); Inflammation (IL-10, IL-1 (IL-la, IL-1b), |
| | IL-13, IL-17 (IL-17a (CTLA8), IL-17b, IL-17c, IL- 17d, IL- |
| | 17f), II-23, Cx3cr1, ptpn22, TNFa, NOD2/CARD15 for IBD, |
| | IL-6, IL-12 (IL-12a, IL-12b), CTLA4, Cx3cl1); Severe |
| | combined immunodeficiencies (SCIDs)(JAK3, JAKL, |
| | DCLREIC, ARTEMIS, SCIDA, RAG1, RAG2, ADA, PTPRC, |
| | CD45, LCA, IL7R, CD3D, T3D, IL2RG, SCIDX1, SCIDX, |
| | IMD4) |
| Metabolic, liver, kidney | Amyloid neuropathy (TTR, PALB); Amyloidosis (APOA1, |
| and protein diseases and | APP, AAA, CVAP, AD1, GSN, FGA, LYZ, TTR, PALB); |
| disorders | Cirrhosis (KRT18, KRT8, CIRH1A, NAIC, TEX292, |
| | KIAA1988); Cystic fibrosis (CFTR, ABCC7, CF, MRP7); |
| | Glycogen storage diseases (SLC2A2, GLUT2, G6PC, G6PT, |
| | G6PT1, GAA, LAMP2, LAMPB, AGL, GDE, GBE1, GYS2, |
| | PYGL, PFKM); Hepatic adenoma, 142330 (TCF1, HNF1A, |
| | MODY3), Hepatic failure, early onset, and neurologic disorder |
| | (SCOD1, SCO1), Hepatic lipase deficiency (LIPC), |
| | Hepatoblastoma, cancer and carcinomas (CTNNB1, PDGFRL, |
| | PDGRL, PRLTS, AXIN1, AXIN, CTNNB1, TP53, P53, LFS1, |
| | IGF2R, MPRI, MET, CASP8, MCH5; Medullary cystic kidney |
| | disease (UMOD, HNFJ, FJHN, MCKD2, ADMCKD2); |
| | Phenylketonuria (PAH, PKU1, QDPR, DHPR, PTS); Polycystic |
| | kidney and hepatic disease (FCYT, PKHD1, ARPKD, PKD1, |
| | PKD2, PKD4, PKDTS, PRKCSH, G19P1, PCLD, SEC63) |
| Muscular/Skeletal | Becker muscular dystrophy (DMD, BMD, MYF6), Duchenne |
| diseases and disorders | Muscular Dystrophy (DMD, BMD); Emery-Dreifuss muscular |
| | dystrophy (LMNA, LMN1, EMD2, FPLD, CMD1A, HGPS, |
| | LGMD1B, LMNA, LMN1, EMD2, FPLD, CMD1A); |
| | Facioscapulohumeral muscular dystrophy (FSHMD1A, |
| | FSHD1A); Muscular dystrophy (FKRP, MDC1C, LGMD2I, |
| | LAMA2, LAMM, LARGE, KIAA0609, MDC1D, FCMD, |
| | TTID, MYOT, CAPN3, CANP3, DYSF, LGMD2B, SGCG, |
| | LGMD2C, DMDA1, SCG3, SGCA, ADL, DAG2, LGMD2D, |
| | DMDA2, SGCB, LGMD2E, SGCD, SGD, LGMD2F, CMD1L, |
| | TCAP, LGMD2G, CMDIN, TRIM32, HT2A, LGMD2H, |
| | FKRP, MDC1C, LGMD2I, TTN, CMD1G, TMD, LGMD2J, |
| | POMT1, CAV3, LGMDIC, SEPN1, SELN, RSMD1, PLEC1, |
| | PLTN, EBS1); Osteopetrosis (LRP5, BMND1, LRP7, LR3, |
| | OPPG, VBCH2, CLCN7, CLC7, OPTA2, OSTM1, GL, |
| | TCIRG1, TIRC7, OC116, OPTB1); Muscular atrophy (VAPB, |
| | VAPC, ALS8, SMN1, SMA1, SMA2, SMA3, SMA4, BSCL2, |
| | SPG17, GARS, SMAD1, CMT2D, HEXB, IGHMBP2, |
| | SMUBP2, CATF1, SMARD1) |
| Dermatological diseases | Albinisim (TYR, OCA2, TYRP1, SLC45A2, LYST), |
| and disorders | Ectodermal dysplasias (EDAR, EDARADD, WNT10A), Ehlers- |
| | Danlos syndrome (COL5A1, COL5A2, COL1A1, COL1A2, |
| | COL3A1, TNXB, ADAMTS2, PLOD1, FKBP14), Ichthyosis- |
| | associated disorders (FLG, STS, TGM1, ALOXE3/ALOX12B, |
| | KRT1, KRT10, ABCA12, KRT2, GJB2, TGM1, ABCA12, |
| | CYP4F22, ALOXE3, CERS3, NSHDL, EBP, MBTPS2, GJB2, |
| | SPINK5, AGHD5, PHYH, PEX7, ALDH3A2, ERCC2, ERCC3, |
| | GFT2H5, GBA), Incontinentia pigmenti (IKBKG, NEMO), |
| | Tuberous sclerosis (TSC1, TSC2), Premature aging syndromes |
| | (POLR3A, PYCR1, LMNA, POLD1, WRN, DMPK) |
| Neurological and Neuronal | ALS (SOD1, ALS2, STEX, FUS, TARDBP, VEGF (VEGF-a, |
| diseases and disorders | VEGF-b, VEGF-c); Alzheimer disease (APP, AAA, CVAP, |
| | AD1, APOE, AD2, PSEN2, AD4, STM2, APBB2, FE65L1, |
| | NOS3, PLAU, URK, ACE, DCP1, ACE1, MPO, PACIP1, |
| | PAXIP1L, PTIP, A2M, BLMH, BMH, PSEN1, AD3); Autism |
| | (Mecp2, BZRAP1, MDGA2, Sema5A, Neurexin 1, GLO1, |
| | MECP2, RTT, PPMX, MRX16, MRX79, NLGN3, NLGN4, |
| | KIAA1260, AUTSX2); Fragile X Syndrome (FMR2, FXR1, |
| | FXR2, mGLUR5); Huntington's disease and disease like |
| | disorders (HD, IT15, PRNP, PRIP, JPH3, JP3, HDL2, TBP, |
| | SCA17); Parkinson disease (NR4A2, NURR1, NOT, TINUR, |
| | SNCAIP, TBP, SCA17, SNCA, NACP, PARK1, PARK4, DJ1, |
| | PARK7, LRRK2, PARK8, PINK1, PARK6, UCHL1, PARK5, |
| | SNCA, NACP, PARK1, PARK4, PRKN, PARK2, PDJ, DBH, |
| | NDUFV2); Rett syndrome (MECP2, RTT, PPMX, MRX16, |
| | MRX79, CDKL5, STK9, MECP2, RTT, PPMX, MRX16, |
| | MRX79, x-Synuclein, DJ-1); Schizophrenia (Neuregulin1 |
| | (Nrg1), Erb4 (receptor for Neuregulin), Complexin1 (Cplx1), |
| | Tph1 Tryptophan hydroxylase, Tph2, Tryptophan hydroxylase 2, |
| | Neurexin 1, GSK3, GSK3a, GSK3b, 5-HTT (Slc6a4), COMT, |
| | DRD (Drd1a), SLC6A3, DAOA, DTNBP1, Dao (Dao1)); |
| | Secretase Related Disorders (APH-1 (alpha and beta), Presenilin |
| | (Psen1), nicastrin, (Ncstn), PEN-2, Nos1, Parp1, Natl, Nat2); |
| | Trinucleotide Repeat Disorders (HTT (Huntington's Dx), |
| | SBMA/SMAX1/AR (Kennedy's Dx), FXN/X25 (Friedrich's |
| | Ataxia), ATX3 (Machado-Joseph's Dx), ATXN1 and ATXN2 |
| | (spinocerebellar ataxias), DMPK (myotonic dystrophy), |
| | Atrophin-1 and Atn1 (DRPLA Dx), CBP (Creb-BP - global |
| | instability), VLDLR (Alzheimer's), Atxn7, Atxn10) |
| Ocular diseases and | Age-related macular degeneration (Abcr, Ccl2, Cc2, cp |
| disorders | (ceruloplasmin), Timp3, cathepsinD, Vldlr, Ccr2); Cataract |
| | (CRYAA, CRYA1, CRYBB2, CRYB2, PITX3, BFSP2, CP49, |
| | CP47, CRYAA, CRYA1, PAX6, AN2, MGDA, CRYBA1, |
| | CRYB1, CRYGC, CRYG3, CCL, LIM2, MP19, CRYGD, |
| | CRYG4, BFSP2, CP49, CP47, HSF4, CTM, HSF4, CTM, MIP, |
| | AQPO, CRYAB, CRYA2, CTPP2, CRYBB1, CRYGD, CRYG4, |
| | CRYBB2, CRYB2, CRYGC, CRYG3, CCL, CRYAA, CRYA1, |
| | GJA8, CX50, CAE1, GJA3, CX46, CZP3, CAE3, CCM1, CAM, |
| | KRIT1); Corneal clouding and dystrophy (APOA1, TGFBI, |
| | CSD2, CDGG1, CSD, BIGH3, CDG2, TACSTD2, TROP2, |
| | M1S1, VSX1, RINX, PPCD, PPD, KTCN, COL8A2, FECD, |
| | PPCD2, PIP5K3, CFD); Cornea plana congenital (KERA, |
| | CNA2); Glaucoma (MYOC, TIGR, GLC1A, JOAG, GPOA, |
| | OPTN, GLC1E, FIP2, HYPL, NRP, CYP1B1, GLC3A, OPA1, |
| | NTG, NPG, CYP1B1, GLC3A); Leber congenital |
| | amaurosis (CRB1, RP12, CRX, CORD2, CRD, RPGRIP1, |
| | LCA6, CORD9, RPE65, RP20, AIPL1, LCA4, GUCY2D, |
| | GUC2D, LCA1, CORD6, RDH12, LCA3); Macular dystrophy |
| | (ELOVL4, ADMD, STGD2, STGD3, RDS, RP7, PRPH2, |
| | PRPH, AVMD, AOFMD, VMD2) |

[0676] Unless otherwise defined, all technical and/or scientific terms used herein have the same meaning as commonly understood by one of ordinary skill in the art to which the invention pertains. Although methods and materials similar or equivalent to those described herein can be used in the practice or testing of embodiments of the invention, exemplary methods and/or materials are described below. In case of conflict, the patent specification, including definitions, will control. In addition, the materials, methods, and examples are illustrative only and are not intended to be necessarily limiting.

[0677] In the discussion unless otherwise stated, adjectives such as “substantially” and “about” modifying a condition or relationship characteristic of a feature or features of an embodiment of the invention, are understood to mean that the condition or characteristic is defined to within tolerances that are acceptable for operation of the embodiment for an application for which it is intended. Unless otherwise indicated, the word “or” in the specification and claims is considered to be the inclusive “or” rather than the exclusive or, and indicates at least one of and any combination of items it conjoins.

[0678] It should be understood that the terms “a” and “an” as used above and elsewhere herein refer to “one or more” of the enumerated components. It will be clear to one of ordinary skill in the art that the use of the singular includes the plural unless specifically stated otherwise. Therefore, the terms “a,” “an” and “at least one” are used interchangeably in this application.

[0679] For purposes of better understanding the present teachings and in no way limiting the scope of the teachings, unless otherwise indicated, all numbers expressing quantities, percentages or proportions, and other numerical values used in the specification and claims, are to be understood as being modified in all instances by the term “about.” Accordingly, unless indicated to the contrary, the numerical parameters set forth in the following specification and attached claims are approximations that may vary depending upon the desired properties sought to be obtained. At the very least, each numerical parameter should at least be construed in light of the number of reported significant digits and by applying ordinary rounding techniques.

[0680] It is understood that where a numerical range is recited herein, the present invention contemplates each integer between, and including, the upper and lower limits, unless otherwise stated.

[0681] In the description and claims of the present application, each of the verbs, “comprise,” “include” and “have” and conjugates thereof, are used to indicate that the object or objects of the verb are not necessarily a complete listing of components, elements or parts of the subject or subjects of the verb. Other terms as used herein are meant to be defined by their well-known meanings in the art.

[0682] The terms “polynucleotide”, “nucleotide”, “nucleotide sequence”, “nucleic acid” and “oligonucleotide” are used interchangeably. They refer to a polymeric form of nucleotides of any length, either deoxyribonueleotides or ribonucleotides, or analogs thereof. Polynucleotides may have any three-dimensional structure, and may perform any function, known or unknown. The following are non-limiting examples of polynucleotides: coding or non-coding regions of a gene or gene fragment, loci (locus) defined from linkage analysis, exons, in Irons, messenger RNA (mRNA), transfer RNA, ribosomal RNA, short interfering RNA (siRNA), short-hairpin RNA (shRNA), micro-RNA (miRNA), ribozymes, cDNA, recombinant polynucleotides, branched polynucleotides, plasmids, vectors, isolated DNA of any sequence, isolated RNA of any sequence, nucleic acid probes, and primers, A polynucleotide may comprise one or more modified nucleotides, such as methylated nucleotides and nucleotide analogs. If present, modifications to the nucleotide structure may be imparted before or after assembly of the polymer. The sequence of nucleotides may be interrupted by non-nucleotide components. A polynucleotide may be further modified after polymerization, such as by conjugation with a labeling component.

[0683] The term “nucleotide analog” or “modified nucleotide” refers to a nucleotide that contains one or more chemical modifications (e.g., substitutions), in or on the nitrogenous base of the nucleoside (e.g., cytosine (C), thymine (T) or uracil (U), adenine (A) or guanine (G)), in or on the sugar moiety of the nucleoside (e.g., ribose, deoxyribose, modified ribose, modified deoxyribose, six-membered sugar analog, or open-chain sugar analog), or the phosphate. Each of the RNA sequences described herein may comprise one or more nucleotide analogs.

[0684] As used herein, the following nucleotide identifiers are used to represent a referenced nucleotide base(s):

| Nucleotide | |
|---|---|
| reference | Base(s) represented |

| | | | | |
|---|---|---|---|---|
| A | A | | | |
| C | | C | | |
| G | | | G | |
| T | | | | T |
| W | A | | | T |
| S | | C | G | |
| M | A | C | | |
| K | | | G | T |
| R | A | | G | |
| Y | | C | | T |
| B | | C | G | T |
| D | A | | G | T |
| H | A | C | | T |
| V | A | C | G | |
| N | A | C | G | T |

[0685] As used herein, the term “targeting sequence”, or “targeting molecule” refers a nucleotide sequence or molecule comprising a nucleotide sequence that is capable of hybridizing to a specific target sequence, e.g., the targeting sequence has a nucleotide sequence which is at least partially complementary to the sequence being targeted along the length of the targeting sequence. The targeting sequence or targeting molecule may be part of a targeting RNA molecule that can form a complex with a CRISPR nuclease with the targeting sequence serving as the targeting portion of the CRISPR complex. When the molecule having the targeting sequence is present contemporaneously with the CRISPR molecule, the RNA molecule is capable of targeting the CRISPR nuclease to the specific target sequence. Each possibility represents a separate embodiment. A targeting RNA molecule can be custom designed to target any desired sequence.

[0686] The term “targets” as used herein, refers to preferential hybridization of a targeting sequence or a targeting molecule to a nucleic acid having a targeted nucleotide sequence. It is understood that the term “targets” encompasses variable hybridization efficiencies, such that there is preferential targeting of the nucleic acid having the targeted nucleotide sequence, but unintentional off-target hybridization in addition to on-target hybridization might also occur. It is understood that where an RNA molecule targets a sequence, a complex of the RNA molecule and a CRISPR nuclease molecule targets the sequence for nuclease activity.

[0687] In the context of targeting a DNA sequence that is present in a plurality of cells, it is understood that the targeting encompasses hybridization of the guide sequence portion of the RNA molecule with the sequence in one or more of the cells, and also encompasses hybridization of the RNA molecule with the target sequence in fewer than all of the cells in the plurality of cells. Accordingly, it is understood that where an RNA molecule targets a sequence in a plurality of cells, a complex of the RNA molecule and a CRISPR nuclease is understood to hybridize with the target sequence in one or more of the cells, and also may hybridize with the target sequence in fewer than all of the cells. Accordingly, it is understood that the complex of the RNA molecule and the CRISPR nuclease introduces a double strand break in relation to hybridization with the target sequence in one or more cells and may also introduce a double strand break in relation to hybridization with the target sequence in fewer than all of the cells. As used herein, the term “modified cells” refers to cells in which a double strand break is affected by a complex of an RNA molecule and the CRISPR nuclease as a result of hybridization with the target sequence, i.e. on-target hybridization.

[0688] As used herein the term “wild type” is a term of the art understood by skilled persons and means the typical form of an organism, strain, gene or characteristic as it occurs in nature as distinguished from mutant or variant forms. Accordingly, as used herein, where a sequence of amino acids or nucleotides refers to a wild type sequence, a variant refers to variant of that sequence, e.g., comprising substitutions, deletions, insertions. In embodiments of the present invention, an engineered CRISPR nuclease is a variant CRISPR nuclease comprising at least one amino acid modification (e.g., substitution, deletion, and/or insertion) compared to the CRISPR nuclease of any of the CRISPR nucleases indicated in Table 1.

[0689] The terms “non-naturally occurring” or “engineered” are used interchangeably and indicate human manipulation. The terms, when referring to nucleic acid molecules or polypeptides may mean that the nucleic acid molecule or the polypeptide is at least substantially free from at least one other component with which they are naturally associated in nature and as found in nature.

[0690] As used herein the term “amino acid” includes natural and/or unnatural or synthetic amino acids, including glycine and both the D or I, optical isomers, and amino acid analogs and peptidomimetics.

[0691] As used herein, “genomic DNA” refers to linear and/or chromosomal DNA and/or to plasmid or other extrachromosomal DNA sequences present in the cell or cells of interest. In some embodiments, the cell of interest is a eukaryotic cell. In some embodiments, the cell of interest is a prokaryotic cell. In some embodiments, the methods produce double-stranded breaks (DSBs) at pre-determined target sites in a genomic DNA sequence, resulting in mutation, insertion, and/or deletion of DNA sequences at the target site(s) in a genome.

[0692] “Eukaryotic” cells include, but are not limited to, fungal cells (such as yeast), plant cells, animal cells, mammalian cells and human cells.

[0693] The term “nuclease” as used herein refers to an enzyme capable of cleaving the phosphodiester bonds between the nucleotide subunits of nucleic acid. A nuclease may be isolated or derived from a natural source. The natural source may be any living organism. Alternatively, a nuclease may be a modified or a synthetic protein which retains the phosphodiester bond cleaving activity.

[0694] The term “PAM” as used herein refers to a nucleotide sequence of a target DNA located in proximity to the targeted DNA sequence and recognized by the CRISPR nuclease. The PAM sequence may differ depending on the nuclease identity.

[0695] The term “mutation disorder” or “mutation disease” as used herein refers to any disorder or disease that is related to dysfunction of a gene caused by a mutation. A dysfunctional gene manifesting as a mutation disorder contains a mutation in at least one of its alleles and is referred to as a “disease-associated gene.” The mutation may be in any portion of the disease-associated gene, for example, in a regulatory, coding, or non-coding portion. The mutation may be any class of mutation, such as a substitution, insertion, or deletion. The mutation of the disease-associated gene may manifest as a disorder or disease according to the mechanism of any type of mutation, such as a recessive, dominant negative, gain-of-function, loss-of-function, or a mutation leading to haploinsufficiency of a gene product.

[0696] A skilled artisan will appreciate that embodiments of the present invention disclose RNA molecules capable of complexing with a nuclease, e.g. a CRISPR nuclease, such as to associate with a target genomic DNA sequence of interest next to a protospacer adjacent motif (PAM). The nuclease then mediates cleavage of target DNA to create a double-stranded break within the protospacer.

[0697] In embodiments of the present invention, a CRISPR nuclease and a targeting molecule form a CRISPR complex that binds to a target DNA sequence to effect cleavage of the target DNA sequence. A CRISPR nuclease may form a CRISPR complex comprising the CRISPR nuclease and RNA molecule without a further, separate tracrRNA molecule. Alternatively, CRISPR nucleases may form a CRISPR complex between the CRISPR nuclease, an RNA molecule, and a tracrRNA molecule.

[0698] The term “protein binding sequence” or “nuclease binding sequence” refers to a sequence capable of binding with a CRISPR nuclease to form a CRISPR complex. A skilled artisan will understand that a tracrRNA capable of binding with a CRISPR nuclease to form a CRISPR complex comprises a protein or nuclease binding sequence.

[0699] An “RNA binding portion” of a CRISPR nuclease refers to a portion of the CRISPR nuclease which may bind to an RNA molecule to form a CRISPR complex, e.g. the nuclease binding sequence of a tracrRNA molecule. An “activity portion” or “active portion” of a CRISPR nuclease refers to a portion of the CRISPR nuclease which effects a double strand break in a DNA molecule, for example when in complex with a DNA-targeting RNA molecule.

[0700] An RNA molecule may comprise a sequence sufficiently complementary to a tracrRNA molecule so as to hybridize to the tracrRNA via basepairing and promote the formation of a CRISPR complex. (See U.S. Pat. No. 8,906,616). In embodiments of the present invention, the RNA molecule may further comprise a portion having a tracr mate sequence.

[0701] In embodiments of the present invention, the targeting molecule may further comprise the sequence of a tracrRNA molecule. Such embodiments may be designed as a synthetic fusion of the guide portion of the RNA molecule (gRNA or crRNA) and the trans-activating crRNA (tracrRNA), together forming a single guide RNA (sgRNA). (See Jinek et al., Science (2012)). Embodiments of the present invention may also form CRISPR complexes utilizing a separate tracrRNA molecule and a separate RNA molecule comprising a guide sequence portion. In such embodiments the tracrRNA molecule may hybridize with the RNA molecule via base pairing and may be advantageous in certain applications of the invention described herein.

[0702] In embodiments of the present invention an RNA molecule may comprise a “nexus” region and/or “hairpin” regions which may further define the structure of the RNA molecule. (See Briner et al., Molecular Cell (2014)).

[0703] As used herein, the term “direct repeat sequence” refers to two or more repeats of a specific amino acid sequence of nucleotide sequence.

[0704] As used herein, an RNA sequence or molecule capable of “interacting with” or “binding” with a CRISPR nuclease refers to the RNA sequence or molecules ability to form a CRISPR complex with the CRISPR nuclease.

[0705] As used herein, the term “operably linked” refers to a relationship (i.e. fusion, hybridization) between two sequences or molecules permitting them to function in their intended manner. In embodiments of the present invention, when an RNA molecule is operably linked to a promoter, both the RNA molecule and the promotor are permitted to function in their intended manner.

[0706] As used herein, the term “heterologous promoter” refers to a promoter that does not naturally occur together with the molecule or pathway being promoted.

[0707] As used herein, a sequence or molecule has an X % “sequence identity” to another sequence or molecule if X % of bases or amino acids between the sequences of molecules are the same and in the same relative position. For example, a first nucleotide sequence having at least a 95% sequence identity with a second nucleotide sequence will have at least 95% of bases, in the same relative position, identical with the other sequence.

### Nuclear Localization Sequences

[0708] The terms “nuclear localization sequence” and “NLS” are used interchangeably to indicate an amino acid sequence/peptide that directs the transport of a protein with which it is associated from the cytoplasm of a cell across the nuclear envelope barrier. The term “NLS” is intended to encompass not only the nuclear localization sequence of a particular peptide, but also derivatives thereof that are capable of directing translocation of a cytoplasmic polypeptide across the nuclear envelope barrier. NLSs are capable of directing nuclear translocation of a polypeptide when attached to the N-terminus, the C-terminus, or both the N- and C-termini of the polypeptide. In addition, a polypeptide having an NLS coupled by its N- or C-terminus to amino acid side chains located randomly along the amino acid sequence of the polypeptide will be translocated. Typically, an NLS consists of one or more short sequences of positively charged lysines or arginines exposed on the protein surface, but other types of NLS are known. Non-limiting examples of NLSs include an NLS sequence derived from: the SV40 virus large T-antigen, nucleoplasmin, c-myc, the hRNPAI M9 NLS, the IBB domain from importin-alpha, myoma T protein, human p53, mouse c-abl IV, influenza vims NS1, Hepatitis virus delta antigen, mouse Mx1 protein, human poly(ADP-ribose) polymerase, and the steroid hormone receptors (human) glucocorticoid.

### Delivery

[0709] The CRISPR nuclease or CRISPR compositions described herein may be delivered as a protein, DNA molecules, RNA molecules, Ribonucleoproteins (RNP), nucleic acid vectors, or any combination thereof. In some embodiments, the RNA molecule comprises a chemical modification. Non-limiting examples of suitable chemical modifications include 2′-O-methyl (M), 2′-O-methyl, 3′phosphorothioate (MS) or 2′-O-methyl, 3′thioPACE (MSP), pseudouridine, and 1-methyl pseudo-uridine. Each possibility represents a separate embodiment of the present invention.

[0710] The CRISPR nucleases and/or polynucleotides encoding same described herein, and optionally additional proteins (e.g., ZFPs, TALENs, transcription factors, restriction enzymes) and/or nucleotide molecules such as guide RNA may be delivered to a target cell by any suitable means. The target cell may be any type of cell e.g., eukaryotic or prokaryotic, in any environment e.g., isolated or not, maintained in culture, in vitro, ex vivo, in vivo or in planta.

[0711] In some embodiments, the composition to be delivered includes mRNA of the nuclease and RNA of the guide. In some embodiments, the composition to be delivered includes mRNA of the nuclease, RNA of the guide and a donor template. In some embodiments, the composition to be delivered includes the CRISPR nuclease and guide RNA. In some embodiments, the composition to be delivered includes the CRISPR nuclease, guide RNA and a donor template for gene editing via, for example, homology directed repair. In some embodiments, the composition to be delivered includes mRNA of the nuclease, DNA-targeting RNA and the tracrRNA. In some embodiments, the composition to be delivered includes mRNA of the nuclease, DNA-targeting RNA and the tracrRNA and a donor template. In some embodiments, the composition to be delivered includes the CRISPR nuclease DNA-targeting RNA and the tracrRNA. In some embodiments, the composition to be delivered includes the CRISPR nuclease, DNA-targeting RNA and the tracrRNA and a donor template for gene editing via, for example, homology directed repair.

[0712] Any suitable viral vector system may be used to deliver RNA compositions. Conventional viral and non-viral based gene transfer methods can be used to introduce nucleic acids and/or CRISPR nuclease in cells (e.g., mammalian cells, plant cells, etc.) and target tissues. Such methods can also be used to administer nucleic acids encoding and/or CRISPR nuclease protein to cells in vitro. In certain embodiments, nucleic acids and/or CRISPR nuclease are administered for in vivo or ex vivo gene therapy uses. Non-viral vector delivery systems include naked nucleic acid, and nucleic acid complexed with a delivery vehicle such as a liposome or poloxamer. For a review of gene therapy procedures, see Anderson, Science (1992); Nabel and Felgner, TIBTECH (1993); Mitani and Caskey, TIBTECH (1993); Dillon, TIBTECH (1993); Miller, Nature (1992); Van Brunt, Biotechnology (1988); Vigne et al., Restorative Neurology and Neuroscience 8:35-36 (1995); Kremer and Perricaudet, British Medical Bulletin (1995); Haddada et al., Current Topics in Microbiology and Immunology (1995); and Yu et al., Gene Therapy 1:13-26 (1994).

[0713] Methods of non-viral delivery of nucleic acids and/or proteins include electroporation, lipofection, microinjection, biolistics, particle gun acceleration, virosomes, liposomes, immunoliposomes, polycation or lipid:nucleic acid conjugates, artificial virions, and agent-enhanced uptake of nucleic acids or can be delivered to plant cells by bacteria or viruses (e.g., Agrobacterium, Rhizobium sp. NGR234, Sinorhizoboiummeliloti, Mesorhizobium loti, tobacco mosaic virus, potato virus X, cauliflower mosaic virus and cassava vein mosaic virus. See, e.g., Chung et al. Trends Plant Sci. (2006). Sonoporation using, e.g., the Sonitron 2000 system (Rich-Mar) can also be used for delivery of nucleic acids. Cationic-lipid mediated delivery of proteins and/or nucleic acids is also contemplated as an in vivo or in vitro delivery method. See Zuris et al., Nat. Biotechnol. (2015), Coelho et al., N. Engl. J. Med. (2013); Judge et al., Mol. Ther. (2006); and Basha et al., Mol. Ther. (2011). Non-viral vectors, such as transposon-based systems e.g., recombinant Sleeping Beauty transposon systems or recombinant PiggyBac transposon systems, may also be delivered to a target cell and utilized for transposition of a polynucleotide sequence of a molecule of the composition or a polynucleotide sequence encoding a molecule of the composition in the target cell.

[0714] Additional exemplary nucleic acid delivery systems include those provided by Amaxa® Biosystems (Cologne, Germany), Maxcyte, Inc. (Rockville, Md.), BTX Molecular Delivery Systems (Holliston, Mass.) and Copernicus Therapeutics Inc., (see for example U.S. Pat. No. 6,008,336). Lipofectionis described in e.g., U.S. Pat. Nos. 5,049,386, 4,946,787; and 4,897,355) and lipofection reagents are sold commercially (e.g., Transfectam™, Lipofectin™ and Lipofectamine™ RNAiMAX). Cationic and neutral lipids that are suitable for efficient receptor-recognition lipofection of polynucleotides include those disclosed in PCT International Publication Nos. WO/1991/017424 and WO/1991/016024. Delivery can be to cells (ex vivo administration) or target tissues (in vivo administration).

[0715] The preparation of lipid:nucleic acid complexes, including targeted liposomes such as immunolipid complexes, is well known to one of skill in the art (see, e.g., Crystal, Science (1995); Blaese et al., Cancer Gene Ther. (1995); Behr et al., Bioconjugate Chem. (1994); Remy et al., Bioconjugate Chem. (1994); Gao and Huang, Gene Therapy (1995); Ahmad and Allen, Cancer Res., (1992); U.S. Pat. Nos. 4,186,183; 4,217,344; 4,235,871; 4,261,975; 4,485,054; 4,501,728; 4,774,085; 4,837,028; and 4,946,787).

[0716] Additional methods of delivery include the use of packaging the nucleic acids to be delivered into EnGeneIC delivery vehicles (EDVs). These EDVs are specifically delivered to target tissues using bispecific antibodies where one arm of the antibody has specificity for the target tissue and the other has specificity for the EDV. The antibody brings the EDVs to the target cell surface and then the EDV is brought into the cell by endocytosis. Once in the cell, the contents are released (see MacDiamid et al., Nature Biotechnology (2009)).

[0717] The use of RNA or DNA viral based systems for the delivery of nucleic acids take advantage of highly evolved processes for targeting a virus to specific cells in the body and trafficking the viral payload to the nucleus. Viral vectors can be administered directly to patients (in vivo) or they can be used to treat cells in vitro and the modified cells are administered to patients (ex vivo). Conventional viral based systems for the delivery of nucleic acids include, but are not limited to, recombinant retroviral, lentivirus, adenoviral, adeno-associated, vaccinia and herpes simplex virus vectors for gene transfer. However, an RNA virus is preferred for delivery of the RNA compositions described herein. Additionally, high transduction efficiencies have been observed in many different cell types and target tissues. Nucleic acid of the invention may be delivered by non-integrating lentivirus. Optionally, RNA delivery with Lentivirus is utilized. Optionally the lentivirus includes mRNA of the nuclease, RNA of the guide. Optionally the lentivirus includes mRNA of the nuclease, RNA of the guide and a donor template. Optionally, the lentivirus includes the nuclease protein, guide RNA. Optionally, the lentivirus includes the nuclease protein, guide RNA and/or a donor template for gene editing via, for example, homology directed repair. Optionally the lentivirus includes mRNA of the nuclease, DNA-targeting RNA, and the tracrRNA. Optionally the lentivirus includes mRNA of the nuclease, DNA-targeting RNA, and the tracrRNA, and a donor template. Optionally, the lentivirus includes the nuclease protein, DNA-targeting RNA, and the tracrRNA. Optionally, the lentivirus includes the nuclease protein, DNA-targeting RNA, and the tracrRNA, and a donor template for gene editing via, for example, homology directed repair.

[0718] As mentioned above, the compositions described herein may be delivered to a target cell using a non-integrating lentiviral particle method, e.g. a LentiFlash® system. Such a method may be used to deliver mRNA or other types of RNAs into the target cell, such that delivery of the RNAs to the target cell results in assembly of the compositions described herein inside of the target cell. See also PCT International Publication Nos. WO2013/014537, WO2014/016690, WO2016185125, WO2017194902, and WO2017194903.

[0719] The tropism of a retrovirus can be altered by incorporating foreign envelope proteins, expanding the potential target population of target cells. Lentiviral vectors are retroviral vectors capable of transducing or infecting non-dividing cells and typically produce high viral titers. Selection of a retroviral gene transfer system depends on the target tissue. Retroviral vectors are comprised of cis-acting long terminal repeats with packaging capacity for up to 6-10 kb of foreign sequence. The minimum cis-acting LTRs are sufficient for replication and packaging of the vectors, which are then used to integrate the therapeutic gene into the target cell to provide permanent transgene expression. Widely used retroviral vectors include those based upon murine leukemia virus (MuLV), gibbon ape leukemia virus (GaLV), Simian Immunodeficiency virus (SIV), human immunodeficiency virus (HIV), and combinations thereof (see, e.g., Buchscher Panganiban, J. Virol. (1992); Johann et al., J. Virol. (1992); Sommerfelt et al., Virol. (1990); Wilson et al., J. Virol. (1989); Miller et al., J. Virol. (1991); PCT International Publication No. WO/1994/026877A1).

[0720] At least six viral vector approaches are currently available for gene transfer in clinical trials, which utilize approaches that involve complementation of defective vectors by genes inserted into helper cell lines to generate the transducing agent.

[0721] pLASN and MFG-S are examples of retroviral vectors that have been used in clinical trials (Dunbar et al., Blood (1995); Kohn et al., Nat. Med. (1995); Malech et al., PNAS (1997)). PA317/pLASN was the first therapeutic vector used in a gene therapy trial. (Blaese et al., Science (1995)). Transduction efficiencies of 50% or greater have been observed for MFG-S packaged vectors. (Ellem et al., Immunol Immunother. (1997); Dranoff et al., Hum. Gene Ther. (1997).

[0722] Packaging cells are used to form virus particles that are capable of infecting a host cell. Such cells include 293 cells, which package adenovirus, AAV, and psi.2 cells or PA317 cells, which package retrovirus. Viral vectors used in gene therapy are usually generated by a producer cell line that packages a nucleic acid vector into a viral particle. The vectors typically contain the minimal viral sequences required for packaging and subsequent integration into a host (if applicable), other viral sequences being replaced by an expression cassette encoding the protein to be expressed. The missing viral functions are supplied in trans by the packaging cell line. For example, AAV vectors used in gene therapy typically only possess inverted terminal repeat (ITR) sequences from the AAV genome which are required for packaging and integration into the host genome. Viral DNA is packaged in a cell line, which contains a helper plasmid encoding the other AAV genes, namely rep and cap, but lacking ITR sequences. The cell line is also infected with adenovirus as a helper. The helper virus promotes replication of the AAV vector and expression of AAV genes from the helper plasmid. The helper plasmid is not packaged in significant amounts due to a lack of ITR sequences. Contamination with adenovirus can be reduced by, e.g., heat treatment to which adenovirus is more sensitive than AAV. Additionally, AAV can be produced at clinical scale using baculovirus systems (see U.S. Pat. No. 7,479,554).

[0723] In many gene therapy applications, it is desirable that the gene therapy vector be delivered with a high degree of specificity to a particular tissue type. Accordingly, a viral vector can be modified to have specificity for a given cell type by expressing a ligand as a fusion protein with a viral coat protein on the outer surface of the virus. The ligand is chosen to have affinity for a receptor known to be present on the cell type of interest. For example, Han et al., Proc. Natl. Acad. Sci. USA (1995), reported that Moloney murine leukemia virus can be modified to express human heregulin fused to gp70, and the recombinant virus infects certain human breast cancer cells expressing human epidermal growth factor receptor. This principle can be extended to other virus-target cell pairs, in which the target cell expresses a receptor and the virus expresses a fusion protein comprising a ligand for the cell-surface receptor. For example, filamentous phage can be engineered to display antibody fragments (e.g., FAB or Fv) having specific binding affinity for virtually any chosen cellular receptor. Although the above description applies primarily to viral vectors, the same principles can be applied to non-viral vectors. Such vectors can be engineered to contain specific uptake sequences which favor uptake by specific target cells.

[0724] Gene therapy vectors can be delivered in vivo by administration to an individual patient, typically by systemic administration (e.g., intravenous, intraperitoneal, intramuscular, subdermal, or intracranial infusion) or topical application, as described below. Alternatively, vectors can be delivered to cells ex vivo, such as cells explanted from an individual patient (e.g., lymphocytes, bone marrow aspirates, tissue biopsy) or universal donor hematopoietic stem cells, followed by reimplantation of the cells into a patient, usually after selection for cells which have incorporated the vector. In some embodiments, delivery of mRNA in vivo and ex vivo, and RNPs delivery may be utilized.

[0725] Ex vivo cell transfection for diagnostics, research, or for gene therapy (e.g., via re-infusion of the transfected cells into the host organism) is well known to those of skill in the art. In a preferred embodiment, cells are isolated from the subject organism, transfected with an RNA composition, and re-infused back into the subject organism (e.g., patient). Various cell types suitable for ex vivo transfection are well known to those of skill in the art (see, e.g., Freshney, “Culture of Animal Cells, A Manual of Basic Technique and Specialized Applications (6th edition, 2010)) and the references cited therein for a discussion of how to isolate and culture cells from patients).

[0726] Suitable cells include but not limited to eukaryotic and prokaryotic cells and/or cell lines. Non-limiting examples of such cells or cell lines generated from such cells include COS, CHO (e.g., CHO-S, CHO-K1, CHO-DG44, CHO-DUXB11, CHO-DUKX, CHOK1SV), VERO, MDCK, WI38, V79, B14AF28-G3, BHK, HaK, NSO, SP2/0-Agl4, HeLa, HEK293 (e.g., HEK293-F, HEK293-H, HEK293-T), and perC6 cells, any plant cell (differentiated or undifferentiated) as well as insect cells such as Spodopterafugiperda (Sf), or fungal cells such as Saccharomyces, Pichia and Schizosaccharomyces. In certain embodiments, the cell line is a CHO-K1, MDCK or HEK293 cell line. Additionally, primary cells may be isolated and used ex vivo for reintroduction into the subject to be treated following treatment with the nucleases (e.g. ZFNs or TALENs) or nuclease systems (e.g. CRISPR). Suitable primary cells include peripheral blood mononuclear cells (PBMC), and other blood cell subsets such as, but not limited to, CD4+ T cells or CD8+ T cells. Suitable cells also include stem cells such as, by way of example, embryonic stem cells, induced pluripotent stem cells, hematopoietic stem cells (CD34+), neuronal stem cells and mesenchymal stem cells.

[0727] In one embodiment, stem cells are used in ex vivo procedures for cell transfection and gene therapy. The advantage to using stem cells is that they can be differentiated into other cell types in-vitro or can be introduced into a mammal (such as the donor of the cells) where they will engraft in the bone marrow. Methods for differentiating CD34+ cells in vitro into clinically important immune cell types using cytokines such a GM-CSF, IFN-gamma. and TNF-alpha are known (as a non-limiting example see, Inaba et al., J. Exp. Med. (1992)).

[0728] Stem cells are isolated for transduction and differentiation using known methods. For example, stem cells are isolated from bone marrow cells by panning the bone marrow cells with antibodies which bind unwanted cells, such as CD4+ and CD8+(T cells), CD45+(panB cells), GR-1 (granulocytes), and lad (differentiated antigen presenting cells) (as a non-limiting example see Inaba et al., J. Exp. Med. (1992)). Stem cells that have been modified may also be used in some embodiments.

[0729] Notably, any one of the CRISPR nucleases described herein may be suitable for genome editing in post-mitotic cells or any cell which is not actively dividing, e.g., arrested cells. Examples of post-mitotic cells which may be edited using a CRISPR nuclease of the present invention include, but are not limited to, myocyte, a cardiomyocyte, a hepatocyte, an osteocyte and a neuron.

[0730] Vectors (e.g., retroviruses, liposomes, etc.) containing therapeutic RNA compositions can also be administered directly to an organism for transduction of cells in vivo. Alternatively, naked RNA or mRNA can be administered. Administration is by any of the routes normally used for introducing a molecule into ultimate contact with blood or tissue cells including, but not limited to, injection, infusion, topical application and electroporation. Suitable methods of administering such nucleic acids are available and well known to those of skill in the art, and, although more than one route can be used to administer a particular composition, a particular route can often provide a more immediate and more effective reaction than another route.

[0731] Vectors suitable for introduction of transgenes into immune cells (e.g., T-cells) include non-integrating lentivirus vectors. See, for example, U.S. Patent Publication No. 2009/0117617.

[0732] Pharmaceutically acceptable carriers are determined in part by the particular composition being administered, as well as by the particular method used to administer the composition. Accordingly, there is a wide variety of suitable formulations of pharmaceutical compositions available, as described below (see, e.g., Remington's Pharmaceutical Sciences, 17th ed., 1989).

### DNA Repair by Homologous Recombination

[0733] The term “homology-directed repair” or “HDR” refers to a mechanism for repairing DNA damage in cells, for example, during repair of double-stranded and single-stranded breaks in DNA. HDR requires nucleotide sequence homology and uses a “nucleic acid template” (nucleic acid template or donor template used interchangeably herein) to repair the sequence where the double-stranded or single break occurred (e.g., DNA target sequence). This results in the transfer of genetic information from, for example, the nucleic acid template to the DNA target sequence. HDR may result in alteration of the DNA target sequence (e.g., insertion, deletion, mutation) if the nucleic acid template sequence differs from the DNA target sequence and part or all of the nucleic acid template polynucleotide or oligonucleotide is incorporated into the DNA target sequence. In some embodiments, an entire nucleic acid template polynucleotide, a portion of the nucleic acid template polynucleotide, or a copy of the nucleic acid template is integrated at the site of the DNA target sequence.

[0734] The terms “nucleic acid template” and “donor”, refer to a nucleotide sequence that is inserted or copied into a genome. The nucleic acid template comprises a nucleotide sequence, e.g., of one or more nucleotides, that will be added to or will template a change in the target nucleic acid or may be used to modify the target sequence. A nucleic acid template sequence may be of any length, for example between 2 and 10,000 nucleotides in length (or any integer value there between or there above), preferably between about 100 and 1,000 nucleotides in length (or any integer there between), more preferably between about 200 and 500 nucleotides in length. A nucleic acid template may be a single stranded nucleic acid, a double stranded nucleic acid. In some embodiment, the nucleic acid template comprises a nucleotide sequence, e.g., of one or more nucleotides, that corresponds to wild type sequence of the target nucleic acid, e.g., of the target position. In some embodiment, the nucleic acid template comprises a ribonucleotide sequence, e.g., of one or more ribonucleotides, that corresponds to wild type sequence of the target nucleic acid, e.g., of the target position. In some embodiment, the nucleic acid template comprises modified ribonucleotides.

[0735] Insertion of an exogenous sequence (also called a “donor sequence,” donor template” or “donor”), for example, for correction of a mutant gene or for increased expression of a wild-type gene can also be carried out. It will be readily apparent that the donor sequence is typically not identical to the genomic sequence where it is placed. A donor sequence can contain a non-homologous sequence flanked by two regions of homology to allow for efficient HDR at the location of interest. Additionally, donor sequences can comprise a vector molecule containing sequences that are not homologous to the region of interest in cellular chromatin. A donor molecule can contain several, discontinuous regions of homology to cellular chromatin. For example, for targeted insertion of sequences not normally present in a region of interest, said sequences can be present in a donor nucleic acid molecule and flanked by regions of homology to sequence in the region of interest.

[0736] The donor polynucleotide can be DNA or RNA, single-stranded and/or double-stranded and can be introduced into a cell in linear or circular form. See, e.g., U.S. Patent Publication Nos. 2010/0047805; 2011/0281361; 2011/0207221; and 2019/0330620. If introduced in linear form, the ends of the donor sequence can be protected (e.g., from exonucleolytic degradation) by methods known to those of skill in the art. For example, one or more dideoxynucleotide residues are added to the 3′ terminus of a linear molecule and/or self-complementary oligonucleotides are ligated to one or both ends. See, for example, Chang and Wilson, Proc. Natl. Acad. Sci. USA (1987); Nehls et al., Science (1996). Additional methods for protecting exogenous polynucleotides from degradation include, but are not limited to, addition of terminal amino group(s) and the use of modified internucleotide linkages such as, for example, phosphorothioates, phosphoramidates, and O-methyl ribose or deoxyribose residues.

[0737] Accordingly, embodiments of the present invention using a donor template for repair may use a DNA or RNA, single-stranded and/or double-stranded donor template that can be introduced into a cell in linear or circular form. In embodiments of the present invention a gene-editing composition comprises: (1) an RNA molecule comprising a guide sequence to affect a double strand break in a gene prior to repair and (2) a donor RNA template for repair, the RNA molecule comprising the guide sequence is a first RNA molecule and the donor RNA template is a second RNA molecule. In some embodiments, the guide RNA molecule and template RNA molecule are connected as part of a single molecule.

[0738] A donor sequence may also be an oligonucleotide and be used for gene correction or targeted alteration of an endogenous sequence. The oligonucleotide may be introduced to the cell on a vector, may be electroporated into the cell, or may be introduced via other methods known in the art. The oligonucleotide can be used to ‘correct’ a mutated sequence in an endogenous gene (e.g., the sickle mutation in beta globin), or may be used to insert sequences with a desired purpose into an endogenous locus.

[0739] A polynucleotide can be introduced into a cell as part of a vector molecule having additional sequences such as, for example, replication origins, promoters and genes encoding antibiotic resistance. Moreover, donor polynucleotides can be introduced as naked nucleic acid, as nucleic acid complexed with an agent such as a liposome or poloxamer, or can be delivered by recombinant viruses (e.g., adenovirus, AAV, herpesvirus, retrovirus, lentivirus and integrase defective lentivirus (IDLV)).

[0740] The donor is generally inserted so that its expression is driven by the endogenous promoter at the integration site, namely the promoter that drives expression of the endogenous gene into which the donor is inserted. However, it will be apparent that the donor may comprise a promoter and/or enhancer, for example a constitutive promoter or an inducible or tissue specific promoter.

[0741] The donor molecule may be inserted into an endogenous gene such that all, some or none of the endogenous gene is expressed. For example, a transgene as described herein may be inserted into an endogenous locus such that some (N-terminal and/or C-terminal to the transgene) or none of the endogenous sequences are expressed, for example as a fusion with the transgene. In other embodiments, the transgene (e.g., with or without additional coding sequences such as forthe endogenous gene) is integrated into any endogenous locus, for example a safe-harbor locus, for example a CCR5 gene, a CXCR4 gene, a PPP1R12c (also known as AAVS1) gene, an albumin gene or a Rosa gene. See, e.g., U.S. Pat. Nos. 7,951,925 and 8,110,379; U.S. Publication Nos. 2008/0159996; 20100/0218264; 2010/0291048; 2012/0017290; 2011/0265198; 2013/0137104; 2013/0122591; 2013/0177983 and 2013/0177960 and U.S. Provisional Application No. 61/823,689).

[0742] When endogenous sequences (endogenous or part of the transgene) are expressed with the transgene, the endogenous sequences may be full-length sequences (wild-type or mutant) or partial sequences. Preferably the endogenous sequences are functional. Non-limiting examples of the function of these full length or partial sequences include increasing the serum half-life of the polypeptide expressed by the transgene (e.g., therapeutic gene) and/or acting as a carrier.

[0743] Furthermore, although not required for expression, exogenous sequences may also include transcriptional or translational regulatory sequences, for example, promoters, enhancers, insulators, internal ribosome entry sites, sequences encoding 2A peptides and/or polyadenylation signals.

[0744] In certain embodiments, the donor molecule comprises a sequence selected from the group consisting of a gene encoding a protein (e.g., a coding sequence encoding a protein that is lacking in the cell or in the individual or an alternate version of a gene encoding a protein), a regulatory sequence and/or a sequence that encodes a structural nucleic acid such as a microRNA or siRNA.

[0745] For the foregoing embodiments, each embodiment disclosed herein is contemplated as being applicable to each of the other disclosed embodiment. For example, it is understood that any of the RNA molecules or compositions of the present invention may be utilized in any of the methods of the present invention.

[0746] As used herein, all headings are simply for organization and are not intended to limit the disclosure in any manner. The content of any individual section may be equally applicable to all sections.

[0747] Additional objects, advantages, and novel features of the present invention will become apparent to one ordinarily skilled in the art upon examination of the following examples, which are not intended to be limiting. Additionally, each of the various embodiments and aspects of the present invention as delineated hereinabove and as claimed in the claims section below finds experimental support in the following examples.

[0748] It is appreciated that certain features of the invention, which are, for clarity, described in the context of separate embodiments, may also be provided in combination in a single embodiment. Conversely, various features of the invention, which are, for brevity, described in the context of a single embodiment, may also be provided separately or in any suitable sub-combination or as suitable in any other described embodiment of the invention. Certain features described in the context of various embodiments are not to be considered essential features of those embodiments, unless the embodiment is inoperative without those elements.

[0749] Generally, the nomenclature used herein, and the laboratory procedures utilized in the present invention include molecular, biochemical, microbiological and recombinant DNA techniques. Such techniques are thoroughly explained in the literature. See, for example, Sambrook et al., “Molecular Cloning: A laboratory Manual” (1989); Ausubel, R. M. (Ed.), “Current Protocols in Molecular Biology” Volumes I-III (1994); Ausubel et al., “Current Protocols in Molecular Biology”, John Wiley and Sons, Baltimore, Maryland (1989); Perbal, “A Practical Guide to Molecular Cloning”, John Wiley & Sons, New York (1988); Watson et al., “Recombinant DNA”, Scientific American Books, New York; Birren et al. (Eds.), “Genome Analysis: A Laboratory Manual Series”, Vols. 1-4, Cold Spring Harbor Laboratory Press, New York (1998); Methodologies as set forth in U.S. Pat. Nos. 4,666,828; 4,683,202; 4,801,531; 5,192,659 and 5,272,057; Cellis, J. E. (Ed.), “Cell Biology: A Laboratory Handbook”, Volumes I-III (1994); Freshney, “Culture of Animal Cells—A Manual of Basic Technique” Third Edition, Wiley-Liss, N. Y. (1994); Coligan J. E. (Ed.), “Current Protocols in Immunology” Volumes I-III (1994); Stites et al. (Eds.), “Basic and Clinical Immunology” (8th Edition), Appleton & Lange, Norwalk, CT (1994); Mishell and Shiigi (Eds.), “Strategies for Protein Purification and Characterization—A Laboratory Course Manual” CSHL Press (1996); Clokie and Kropinski (Eds.), “Bacteriophage Methods and Protocols”, Volume 1: Isolation, Characterization, and Interactions (2009), all of which are incorporated by reference. Other general references are provided throughout this document.

[0750] Examples are provided below to facilitate a more complete understanding of the invention. The following examples illustrate the exemplary modes of making and practicing the invention. However, the scope of the invention is not limited to specific embodiments disclosed in these Examples, which are for purposes of illustration only.

### EXPERIMENTAL DETAILS

[0751] Examples are provided below to facilitate a more complete understanding of the invention. The following examples illustrate the exemplary modes of making and practicing the invention. However, the scope of the invention is not limited to specific embodiments disclosed in these Examples, which are for purposes of illustration only.

[0752] CRISPR repeat (crRNA), trans-activating RNA (tracrRNA), nuclease polypeptide (OMNI), and protospacer adjacent motif (PAM) sequences were predicted from different metagenomic databases of sequences of environmental samples.

### Construction of OMNI Nuclease Polypeptides

[0753] For construction of novel nuclease polypeptides (OMNIs), the open reading frame of several identified OMNIs were codon optimized for human cell line expression. The ORF was cloned into the bacterial expression plasmid pET9a and into the mammalian expression plasmid pmOMNI (Table 4).

Prediction and Construction of sgRNA

[0754] For each OMNI the single guide RNA (sgRNA) was predicted by detection of the CRISPR repeat array sequence and a tracrRNA in the respective bacterial genome. The native pre-mature crRNA and tracrRNA sequences were connected in silico with a tetra-loop ‘gaaa’ sequence and the secondary structure elements of the duplex were predicted using an RNA secondary structure prediction tool.

[0755] The predicted secondary structures of the full duplex RNA elements (crRNA-tracrRNA chimera) were used for identification of possible tracrRNA sequences for the design of a sgRNA. Several possible sgRNA scaffolds versions were constructed by shortening the duplex at the upper stem at different locations (sgRNA designs of all OMNIs are listed in Table 2). Additionally, to overcome potential transcriptional and structural constraints and to assess the plasticity of the sgRNA scaffold in the human cellular environmental context, small changes in the nucleotide sequence of the possible sgRNA were made in some cases (FIG. 1, Table 2). Finally, up to four versions of possible designed scaffolds were synthesized for each OMNI and connected downstream to a 22-nucleotide universal unique spacer sequence (T2, SEQ ID NO: 268) and cloned into a bacterial expressing plasmid under an inducible T7 promoter combined with a U6 promoter for mammalian expression (pShuttleGuide, Table 4).

| | T2 |
|---|---|
| (SEQ ID NO: 2782) | |
| | GGAAGAGCAGAGCCTTGGTCTC |

### In-Vitro Depletion Assay by TXTL

[0756] Depletion of PAM sequences in vitro was followed as described by Maxwell et al, Methods. 2018. Briefly, linear DNA expressing the OMNI nucleases and an sgRNA under T7 promoter were added to a cell-free transcription-translation in vitro system (TXTL mix, Arbor Bioscience) together with a linear construct expressing T7 polymerase. RNA expression and protein translation by the TXTL mix result in the formation of a ribonucleoprotein (RNP) complex. Since linear DNA was used, Chi6 DNA sequences were added to the TXTL reaction mix to inhibit the exonuclease activity of RecBCD, thereby protecting the linear DNA from degradation. The sgRNA spacer is designed to target a library of plasmids containing the target protospacer (pbPOS T2 library, Table 4) flanked by an 8N randomized set of potential PAM sequences. Depletion of PAM sequences from the library was measured by high-throughput sequencing using PCR to add the necessary adapters and indices to both the cleaved library and to a control library expressing a non-targeting gRNA. Following deep sequencing, the in vitro activity was confirmed by the fraction of the depleted sequences having the same PAM sequence relative to their occurrence in the control, indicating functional DNA cleavage by the OMNI nuclease (FIGS. 2-109, Table 3).

### Activity in Human Cells on Endogenous Genomic Targets

[0757] OMNIs were also assayed for their ability to promote editing on specific genomic locations in human cells. To this end, per each OMNI, a corresponding OMNI-P2A-mCherry expression vector (pmOMNI, Table 4) was transfected into HeLa cells together with an sgRNA designed to target a specific location in the human genome (pShuttle guide—Table 4, spacer sequence—Table 5). At 72 h, cells were harvested, and their genomic DNA content was used in a PCR reaction, amplifying the corresponding putative genomic targets. Amplicons were subjected to next-generation sequence (NGS) and the resulting sequences were then used to calculate the percentage of editing events in each target site. Short insertions or deletions (indels) around the cut site are the typical outcome of DNA repair following nuclease induced DNA cleavage. The calculation of editing percent was therefore deduced from the fraction of indel-containing sequences within each amplicon.

[0758] Genomic activity of each ONMI was assessed using a panel of six (6) unique sgRNAs each designed to target a different genomic location. The results of these experiments are summarized in Table 5. As can be seen in the table (column 6, “% indels”), many OMNIs exhibited high and significant editing levels compared to the negative control (not shown) in most or some of the target sites tested.

TABLE 1
OMNI CRISPR nuclease sequences

| | | SEQ ID | SEQ ID NO of | | | Dead nuclease |
|---|---|---|---|---|---|---|
| | | NO of | DNA sequence | Nickase | Nickase | having |
| | SEQ ID NO | DNA | codon | having | having | inactivated |
| | of OMNI | sequence | optimized for | inactivated | inactivated | RuvC and |
| “OMNI” | Amino Acid | encoding | expression in | RuvC | HNH | HNH |
| Name | Sequence | OMNI | human cells | domain | domain | domains |
| OMNI-263 | 1 | 109 | 217 | (D9 or E513 | (D594* or | (D9 or E513 or |
| | | | | or H733 or | H595 or | H733 or D736) |
| | | | | D736) | N618) | and (D594* or |
| | | | | | | H595 or N618) |
| OMNI-264 | 2 | 110 | 218 | (D9 or E480 | (E562* or | (D9 or E480 or |
| | | | | or H697 or | H563 or | H697 or D700) |
| | | | | D700) | N586) | and (E562* or |
| | | | | | | H563 or N586) |
| OMNI-266 | 3 | 111 | 219 | (D9 or E533 | (D612* or | (D9 or E533 or |
| | | | | or H756 or | H613 or | H756 or D759) |
| | | | | D759) | N636) | and (D612* or |
| | | | | | | H613 or N636) |
| OMNI-268 | 4 | 112 | 220 | (D9 or E492 | (D571* or | (D9 or E492 or |
| | | | | or H719 or | H572 or | H719 or D722) |
| | | | | D722) | N595) | and (D571* or |
| | | | | | | H572 or N595) |
| OMNI-269 | 5 | 113 | 221 | (D8 or E491 | (D572* or | (D8 or E491 or |
| | | | | or H702 or | H573 or | H702 or D705) |
| | | | | D705) | N596) | and (D572* or |
| | | | | | | H573 or N596) |
| OMNI-271 | 6 | 114 | 222 | (D7 or E495 | (E576* or | (D7 or E495 or |
| | | | | or H719 or | H577 or | H719 or D722) |
| | | | | D722) | N600) | and (E576* or |
| | | | | | | H577 or N600) |
| OMNI-274 | 7 | 115 | 223 | (D8 or E498 | (D579* or | (D8 or E498 or |
| | | | | or H709 or | H580 or | H709 or D712) |
| | | | | D712) | N603) | and (D579* or |
| | | | | | | H580 or N603) |
| OMNI-275 | 8 | 116 | 224 | (D8 or E534 | (D609* or | (D8 or E534 or |
| | | | | or H761 or | H610 or | H761 or D764) |
| | | | | D764) | N635) | and (D609* or |
| | | | | | | H610 or N635) |
| OMNI-276 | 9 | 117 | 225 | (D16 or E518 | (D599* or | (D16 or E518 |
| | | | | or H748 or | H600 or | or H748 or |
| | | | | D751) | N623) | D751) and |
| | | | | | | (D599* or |
| | | | | | | H600 or N623) |
| OMNI-278 | 10 | 118 | 226 | (D12 or E784 | (D865* or | (D12 or E784 |
| | | | | or H998 or | H866 or | or H998 or |
| | | | | D1001) | N890) | D1001) and |
| | | | | | | (D865* or |
| | | | | | | H866 or N890) |
| OMNI-279 | 11 | 119 | 227 | (D8 or E742 | (E866* or | (D8 or E742 or |
| | | | | or H1064 or | H867 or | H1064 or |
| | | | | D1067) | N890) | D1067) and |
| | | | | | | (E866* or |
| | | | | | | H867 or N890) |
| OMNI-280 | 12 | 120 | 228 | (D10 or E527 | (D609* or | (D10 or E527 |
| | | | | or H756 or | H610 or | or H756 or |
| | | | | D759) | N633) | D759) and |
| | | | | | | (D609* or |
| | | | | | | H610 or N633) |
| OMNI-281 | 13 | 121 | 229 | (D9 or E479 | (D558* or | (D9 or E479 or |
| | | | | or H703 or | H559 or | H703 or D706) |
| | | | | D706) | N582) | and (D558* or |
| | | | | | | H559 or N582) |
| OMNI-283 | 14 | 122 | 230 | (D14 or E528 | (D611* or | (D14 or E528 |
| | | | | or H786 or | H612 or | or H786 or |
| | | | | D789) | N635) | D789) and |
| | | | | | | (D611* or |
| | | | | | | H612 or N635) |
| OMNI-284 | 15 | 123 | 231 | (D9 or E515 | (D596* or | (D9 or E515 or |
| | | | | or H735 or | H597 or | H735 or D738) |
| | | | | D738) | N620) | and (D596* or |
| | | | | | | H597 or N620) |
| OMNI-286 | 16 | 124 | 232 | (D7 or E503 | (D584* or | (D7 or E503 or |
| | | | | or H719 or | H585 or | H719 or D722) |
| | | | | D722) | N608) | and (D584* or |
| | | | | | | H585 or N608) |
| OMNI-287 | 17 | 125 | 233 | (D8 or E508 | (D588* or | (D8 or E508 or |
| | | | | or H727 or | H589 or | H727 or D730) |
| | | | | D730) | N612) | and (D588* or |
| | | | | | | H589 or N612) |
| OMNI-288 | 18 | 126 | 234 | (D24 or E534 | (E614* or | (D24 or E534 |
| | | | | or H759 or | H615 or | or H759 or |
| | | | | D762) | N638) | D762) and |
| | | | | | | (E614* or |
| | | | | | | H615 or N638) |
| OMNI-290 | 19 | 127 | 235 | (D10 or E506 | (D587* or | (D10 or E506 |
| | | | | or H725 or | H588 or | or H725 or |
| | | | | D728) | N611) | D728) and |
| | | | | | | (D587* or |
| | | | | | | H588 or N611) |
| OMNI-291 | 20 | 128 | 236 | (D10 or E500 | (D581* or | (D10 or E500 |
| | | | | or H719 or | H582 or | or H719 or |
| | | | | D722) | N605) | D722) and |
| | | | | | | (D581* or |
| | | | | | | H582 or N605) |
| OMNI-293 | 21 | 129 | 237 | (D8 or E509 | (D590* or | (D8 or E509 or |
| | | | | or H728 or | H591 or | H728 or D731) |
| | | | | D731) | N614) | and (D590* or |
| | | | | | | H591 or N614) |
| OMNI-294 | 22 | 130 | 238 | (D10 or E501 | (D582* or | (D10 or E501 |
| | | | | or H720 or | H583 or | or H720 or |
| | | | | D723) | N606) | D723) and |
| | | | | | | (D582* or |
| | | | | | | H583 or N606) |
| OMNI-295 | 23 | 131 | 239 | (D7 or E521 | (D605* or | (D7 or E521 or |
| | | | | or H780 or | H606 or | H780 or D783) |
| | | | | D783) | N629) | and (D605* or |
| | | | | | | H606 or N629) |
| OMNI-296 | 24 | 132 | 240 | (D8 or E509 | (D590* or | (D8 or E509 or |
| | | | | or H731 or | H591 or | H731 or D734) |
| | | | | D734) | N614) | and (D590* or |
| | | | | | | H591 or N614) |
| OMNI-297 | 25 | 133 | 241 | (D9 or E505 | (D585* or | (D9 or E505 or |
| | | | | or H722 or | H586 or | H722 or D725) |
| | | | | D725) | N609) | and (D585* or |
| | | | | | | H586 or N609) |
| OMNI-298 | 26 | 134 | 242 | (D8 or E499 | (D581* or | (D8 or E499 or |
| | | | | or H721 or | H582 or | H721 or D724) |
| | | | | D724) | N605) | and (D581* or |
| | | | | | | H582 or N605) |
| OMNI-299 | 27 | 135 | 243 | (D10 or E504 | (D585* or | (D10 or E504 |
| | | | | or H723 or | H586 or | or H723 or |
| | | | | D726) | N609) | D726) and |
| | | | | | | (D585* or |
| | | | | | | H586 or N609) |
| OMNI-300 | 28 | 136 | 244 | (D8 or E503 | (D583* or | (D8 or E503 or |
| | | | | or H719 or | H584 or | H719 or D722) |
| | | | | D722) | N607) | and (D583* or |
| | | | | | | H584 or N607) |
| OMNI-301 | 29 | 137 | 245 | (D9 or E507 | (D588* or | (D9 or E507 or |
| | | | | or H726 or | H589 or | H726 or D729) |
| | | | | D729) | N612) | and (D588* or |
| | | | | | | H589 or N612) |
| OMNI-302 | 30 | 138 | 246 | (D9 or E506 | (D587* or | (D9 or E506 or |
| | | | | or H725 or | H588 or | H725 or D728) |
| | | | | D728) | N611) | and (D587* or |
| | | | | | | H588 or N611) |
| OMNI-303 | 31 | 139 | 247 | (D8 or E505 | (D584* or | (D8 or E505 or |
| | | | | or H720 or | H585 or | H720 or D723) |
| | | | | D723) | N608) | and (D584* or |
| | | | | | | H585 or N608) |
| OMNI-304 | 32 | 140 | 248 | (D8 or E517 | (D613* or | (D8 or E517 or |
| | | | | or H775 or | H614 or | H775 or D778) |
| | | | | D778) | N637) | and (D613* or |
| | | | | | | H614 or N637) |
| OMNI-305 | 33 | 141 | 249 | (D8 or E510 | (D591* or | (D8 or E510 or |
| | | | | or H729 or | H592 or | H729 or D732) |
| | | | | D732) | N615) | and (D591* or |
| | | | | | | H592 or N615) |
| OMNI-307 | 34 | 142 | 250 | (D9 or E779 | (D863* or | (D9 or E779 or |
| | | | | or H996 or | H864 or | H996 or D999) |
| | | | | D999) | N887) | and (D863* or |
| | | | | | | H864 or N887) |
| OMNI-308 | 35 | 143 | 251 | (D8 or E504 | (D585* or | (D8 or E504 or |
| | | | | or H727 or | H586 or | H727 or D730) |
| | | | | D730) | N609) | and (D585* or |
| | | | | | | H586 or N609) |
| OMNI-309 | 36 | 144 | 252 | (D11 or E518 | (D598* or | (D11 or E518 |
| | | | | or H737 or | H599 or | or H737 or |
| | | | | D740) | N622) | D740) and |
| | | | | | | (D598* or |
| | | | | | | H599 or N622) |
| OMNI-310 | 37 | 145 | 253 | (D9 or E506 | (D593* or | (D9 or E506 or |
| | | | | or H741 or | H594 or | H741 or D744) |
| | | | | D744) | N617) | and (D593* or |
| | | | | | | H594 or N617) |
| OMNI-311 | 38 | 146 | 254 | (D8 or E510 | (D597* or | (D8 or E510 or |
| | | | | or H740 or | H598 or | H740 or D743) |
| | | | | D743) | N621) | and (D597* or |
| | | | | | | H598 or N621) |
| OMNI-312 | 39 | 147 | 255 | (D11 or E583 | (E662* or | (D11 or E583 |
| | | | | or H836 or | H663 or | or H836 or |
| | | | | D839) | N686) | D839) and |
| | | | | | | (E662* or |
| | | | | | | H663 or N686) |
| OMNI-313 | 40 | 148 | 256 | (D34 or E534 | (D615* or | (D34 or E534 |
| | | | | or H752 or | H616 or | or H752 or |
| | | | | D755) | N639) | D755) and |
| | | | | | | (D615* or |
| | | | | | | H616 or N639) |
| OMNI-314 | 41 | 149 | 257 | (D8 or E505 | (D586* or | (D8 or E505 or |
| | | | | or H725 or | H587 or | H725 or D728) |
| | | | | D728) | N610) | and (D586* or |
| | | | | | | H587 or N610) |
| OMNI-315 | 42 | 150 | 258 | (D8 or E507 | (D593* or | (D8 or E507 or |
| | | | | or H744 or | H594 or | H744 or D747) |
| | | | | D747) | N617) | and (D593* or |
| | | | | | | H594 or N617) |
| OMNI-316 | 43 | 151 | 259 | (D8 or E498 | (D584* or | (D8 or E498 or |
| | | | | or H730 or | H585 or | H730 or D733) |
| | | | | D733) | N608) | and (D584* or |
| | | | | | | H585 or N608) |
| OMNI-317 | 44 | 152 | 260 | (D11 or E531 | (D612 or | (D11 or E531 |
| | | | | or H751 or | H613 or | or H751 or |
| | | | | D754) | N636) | D754) and |
| | | | | | | (D612* or |
| | | | | | | H613 or N636) |
| OMNI-318 | 45 | 153 | 261 | (D17 or E516 | (D597* or | (D17 or E516 |
| | | | | or H753 or | H598 or | or H753 or |
| | | | | D756) | N621) | D756) and |
| | | | | | | (D597* or |
| | | | | | | H598 or N621) |
| OMNI-319 | 46 | 154 | 262 | (D38 or E537 | (D624* or | (D38 or E537 |
| | | | | or H768 or | H625 or | or H768 or |
| | | | | D771) | N648) | D771) and |
| | | | | | | (D624* or |
| | | | | | | H625 or N648) |
| OMNI-320 | 47 | 155 | 263 | (D12 or E533 | (D614* or | (D12 or E533 |
| | | | | or H755 or | H615 or | or H755 or |
| | | | | D758) | N638) | D758) and |
| | | | | | | (D614* or |
| | | | | | | H615 or N638) |
| OMNI-321 | 48 | 156 | 264 | (D10 or E524 | (D605* or | (D10 or E524 |
| | | | | or H747 or | H606 or | or H747 or |
| | | | | D750) | N629) | D750) and |
| | | | | | | (D605* or |
| | | | | | | H606 or N629) |
| OMNI-322 | 49 | 157 | 265 | (D10 or E530 | (D611* or | (D10 or E530 |
| | | | | or H751 or | H612 or | or H751 or |
| | | | | D754) | N635) | D754) and |
| | | | | | | (D611* or |
| | | | | | | H612 or N635) |
| OMNI-323 | 50 | 158 | 266 | (D8 or E537 | (E613* or | (D8 or E537 or |
| | | | | or H800 or | H614 or | H800 or D803) |
| | | | | D803) | N637) | and (E613* or |
| | | | | | | H614 or N637) |
| OMNI-324 | 51 | 159 | 267 | (D8 or E508 | (D594* or | (D8 or E508 or |
| | | | | or H753 or | H595 or | H753 or D756) |
| | | | | D756) | N618) | and (D594* or |
| | | | | | | H595 or N618) |
| OMNI-325 | 52 | 160 | 268 | (D26 or E544 | (D624* or | (D26 or E544 |
| | | | | or H769 or | H625 or | or H769 or |
| | | | | D772) | N648) | D772) and |
| | | | | | | (D624* or |
| | | | | | | H625 or N648) |
| OMNI-326 | 53 | 161 | 269 | (D26 or E541 | (D621* or | (D26 or E541 |
| | | | | or H766 or | H622 or | or H766 or |
| | | | | D769) | N645) | D769) and |
| | | | | | | (D621* or |
| | | | | | | H622 or N645) |
| OMNI-327 | 54 | 162 | 270 | (D9 or E523 | (D606* or | (D9 or E523 or |
| | | | | or M799 or | H607 or | M799 or S802) |
| | | | | S802) | N632) | and (D606* or |
| | | | | | | H607 or N632) |
| OMNI-329 | 55 | 163 | 271 | (D9 or E760 | (D841* or | (D9 or E760 or |
| | | | | or H974 or | H842 or | H974 or D977) |
| | | | | D977) | N865) | and (D841* or |
| | | | | | | H842 or N865) |
| OMNI-330 | 56 | 164 | 272 | (D8 or E592 | (E671* or | (D8 or E592 or |
| | | | | or H836 or | H672 or | H836 or D839) |
| | | | | D839) | N695) | and (E671* or |
| | | | | | | H672 or N695) |
| OMNI-331 | 57 | 165 | 273 | (D8 or E594 | (E676* or | (D8 or E594 or |
| | | | | or H843 or | H677 or | H843 or D846) |
| | | | | D846) | N700) | and (E676* or |
| | | | | | | H677 or N700) |
| OMNI-332 | 58 | 166 | 274 | (D9 or E594 | (E680* or | (D9 or E594 or |
| | | | | or H853 or | H681 or | H853 or D856) |
| | | | | D856) | N704) | and (E680* or |
| | | | | | | H681 or N704) |
| OMNI-333 | 59 | 167 | 275 | (D8 or E541 | (D626* or | (D8 or E541 or |
| | | | | or H777 or | H627 or | H777 or D780) |
| | | | | D780) | N650) | and (D626* or |
| | | | | | | H627 or N650) |
| OMNI-334 | 60 | 168 | 276 | (D7 or E629 | (E707* or | (D7 or E629 or |
| | | | | or H890 or | H708 or | H890 or D893) |
| | | | | D893) | N731) | and (E707* or |
| | | | | | | H708 or N731) |
| OMNI-336 | 61 | 169 | 277 | (D12 or E746 | (D831* or | (D12 or E746 |
| | | | | or H964 or | H832 or | or H964 or |
| | | | | D967) | N855) | D967) and |
| | | | | | | (D831* or |
| | | | | | | H832 or N855) |
| OMNI-337 | 62 | 170 | 278 | (D12 or E754 | (D839* or | (D12 or E754 |
| | | | | or H972 or | H840 or | or H972 or |
| | | | | D975) | N863) | D975) and |
| | | | | | | (D839* or |
| | | | | | | H840 or N863) |
| OMNI-338 | 63 | 171 | 279 | (D12 or E756 | (D836* or | (D12 or E756 |
| | | | | or H967 or | H837 or | or H967 or |
| | | | | D970) | N860) | D970) and |
| | | | | | | (D836* or |
| | | | | | | H837 or N860) |
| OMNI-339 | 64 | 172 | 280 | (D18 or E765 | (D848* or | (D18 or E765 |
| | | | | or H981 or | H849 or | or H981 or |
| | | | | D984) | N872) | D984) and |
| | | | | | | (D848* or |
| | | | | | | H849 or N872) |
| OMNI-340 | 65 | 173 | 281 | (D13 or E794 | (D881* or | (D13 or E794 |
| | | | | or H1018 or | H882 or | or H1018 or |
| | | | | D1021) | N905) | D1021) and |
| | | | | | | (D881* or |
| | | | | | | H882 or N905) |
| OMNI-341 | 66 | 174 | 282 | (D18 or E767 | (D851* or | (D18 or E767 |
| | | | | or H983 or | H852 or | or H983 or |
| | | | | D986) | N875) | D986) and |
| | | | | | | (D851* or |
| | | | | | | H852 or N875) |
| OMNI-342 | 67 | 175 | 283 | (D10 or E763 | (D844* or | (D10 or E763 |
| | | | | or H976 or | H845 or | or H976 or |
| | | | | D979) | N868) | D979) and |
| | | | | | | (D844* or |
| | | | | | | H845 or N868) |
| OMNI-343 | 68 | 176 | 284 | (D10 or E764 | (D847* or | (D10 or E764 |
| | | | | or H979 or | H848 or | or H979 or |
| | | | | D982) | N871) | D982) and |
| | | | | | | (D847* or |
| | | | | | | H848 or N871) |
| OMNI-344 | 69 | 177 | 285 | (D18 or E775 | (D858* or | (D18 or E775 |
| | | | | or H991 or | H859 or | or H991 or |
| | | | | D994) | N882) | D994) and |
| | | | | | | (D858* or |
| | | | | | | H859 or N882) |
| OMNI-345 | 70 | 178 | 286 | (D18 or E775 | (D858* or | (D18 or E775 |
| | | | | or H991 or | H859 or | or H991 or |
| | | | | D994) | N882) | D994) and |
| | | | | | | (D858* or |
| | | | | | | H859 or N882) |
| OMNI-346 | 71 | 179 | 287 | (D18 or E780 | (D863* or | (D18 or E780 |
| | | | | or H996 or | H864 or | or H996 or |
| | | | | D999) | N887) | D999) and |
| | | | | | | (D863* or |
| | | | | | | H864 or N887) |
| OMNI-347 | 72 | 180 | 288 | (D18 or E783 | (D866* or | (D18 or E783 |
| | | | | or H999 or | H867 or | or H999 or |
| | | | | D1002) | N890) | D1002) and |
| | | | | | | (D866* or |
| | | | | | | H867 or N890) |
| OMNI-348 | 73 | 181 | 289 | (D9 or E776 | (D853* or | (D9 or E776 or |
| | | | | or H985 or | H854 or | H985 or D988) |
| | | | | D988) | N877) | and (D853* or |
| | | | | | | H854 or N877) |
| OMNI-349 | 74 | 182 | 290 | (D15 or E765 | (D850* or | (D15 or E765 |
| | | | | or H982 or | H851 or | or H982 or |
| | | | | D985) | N874) | D985) and |
| | | | | | | (D850* or |
| | | | | | | H851 or N874) |
| OMNI-350 | 75 | 183 | 291 | (D15 or E773 | (D854* or | (D15 or E773 |
| | | | | or H986 or | H855 or | or H986 or |
| | | | | D989) | N878) | D989) and |
| | | | | | | (D854* or |
| | | | | | | H855 or N878) |
| OMNI-351 | 76 | 184 | 292 | (D13 or E766 | (D850* or | (D13 or E766 |
| | | | | or H983 or | H851 or | or H983 or |
| | | | | D986) | N874) | D986) and |
| | | | | | | (D850* or |
| | | | | | | H851 or N874) |
| OMNI-352 | 77 | 185 | 293 | (D12 or E774 | (D852* or | (D12 or E774 |
| | | | | or H984 or | H853 or | or H984 or |
| | | | | D987) | N876) | D987) and |
| | | | | | | (D852* or |
| | | | | | | H853 or N876) |
| OMNI-353 | 78 | 186 | 294 | (D10 or E780 | (D860* or | (D10 or E780 |
| | | | | or H992 or | H861 or | or H992 or |
| | | | | D995) | N884) | D995) and |
| | | | | | | (D860* or |
| | | | | | | H861 or N884) |
| OMNI-354 | 79 | 187 | 295 | (D15 or E764 | (D862* or | (D15 or E764 |
| | | | | or H1003 or | H863 or | or H1003 or |
| | | | | D1006) | N886) | D1006) and |
| | | | | | | (D862* or |
| | | | | | | H863 or N886) |
| OMNI-356 | 80 | 188 | 296 | (D13 or E777 | (D859* or | (D13 or E777 |
| | | | | or H992 or | H860 or | or H992 or |
| | | | | D995) | N883) | D995) and |
| | | | | | | (D859* or |
| | | | | | | H860 or N883) |
| OMNI-357 | 81 | 189 | 297 | (D10 or E773 | (D857* or | (D10 or E773 |
| | | | | or H998 or | H858 or | or H998 or |
| | | | | D1001) | N881) | D1001) and |
| | | | | | | (D857* or |
| | | | | | | H858 or N881) |
| OMNI-358 | 82 | 190 | 298 | (D7 or E785 | (D867* or | (D7 or E785 or |
| | | | | or H1000 or | H868 or | H1000 or |
| | | | | D1003) | N892) | D1003) and |
| | | | | | | (D867* or |
| | | | | | | H868 or N892) |
| OMNI-359 | 83 | 191 | 299 | (D12 or E778 | (D861* or | (D12 or E778 |
| | | | | or H995 or | H862 or | or H995 or |
| | | | | D998) | N886) | D998) and |
| | | | | | | (D861* or |
| | | | | | | H862 or N886) |
| OMNI-360 | 84 | 192 | 300 | (D10 or E781 | (D865* or | (D10 or E781 |
| | | | | or H997 or | H866 or | or H997 or |
| | | | | D1000) | N890) | D1000) and |
| | | | | | | (D865* or |
| | | | | | | H866 or N890) |
| OMNI-361 | 85 | 193 | 301 | (D11 or E778 | (E863* or | (D11 or E778 |
| | | | | or H995 or | H864 or | or H995 or |
| | | | | D998) | N888) | D998) and |
| | | | | | | (E863 or H864 |
| | | | | | | or N888) |
| OMNI-362 | 86 | 194 | 302 | (D11 or E779 | (D863* or | (D11 or E779 |
| | | | | or H996 or | H864 or | or H996 or |
| | | | | D999) | N888) | D999) and |
| | | | | | | (D863* or |
| | | | | | | H864 or N888) |
| OMNI-363 | 87 | 195 | 303 | (D10 or E788 | (D872* or | (D10 or E788 |
| | | | | or H1005 or | H873 or | or H1005 or |
| | | | | D1008) | N897) | D1008) and |
| | | | | | | (D872* or |
| | | | | | | H873 or N897) |
| OMNI-364 | 88 | 196 | 304 | (D9 or E778 | (D867* or | (D9 or E778 or |
| | | | | or H1000 or | H868 or | H1000 or |
| | | | | D1003) | N892) | D1003) and |
| | | | | | | (D867* or |
| | | | | | | H868 or N892) |
| OMNI-365 | 89 | 197 | 305 | (D10 or E778 | (D864* or | (D10 or E778 |
| | | | | or H997 or | H865 or | or H997 or |
| | | | | D1000) | N889) | D1000) and |
| | | | | | | (D864* or |
| | | | | | | H865 or N889) |
| OMNI-366 | 90 | 198 | 306 | (D9 or E780 | (E866* or | (D9 or E780 or |
| | | | | or H999 or | H867 or | H999 or |
| | | | | D1002) | N891) | D1002) and |
| | | | | | | (E866* or |
| | | | | | | H867 or N891) |
| OMNI-367 | 91 | 199 | 307 | (D14 or E776 | (D859* or | (D14 or E776 |
| | | | | or H992 or | H860 or | or H992 or |
| | | | | D995) | N883) | D995) and |
| | | | | | | (D859* or |
| | | | | | | H860 or N883) |
| OMNI-368 | 92 | 200 | 308 | (D14 or E783 | (D863* or | (D14 or E783 |
| | | | | or H995 or | H864 or | or H995 or |
| | | | | D998) | N887) | D998) and |
| | | | | | | (D863* or |
| | | | | | | H864 or N887) |
| OMNI-369 | 93 | 201 | 309 | (D11 or E787 | (D871* or | (D11 or E787 |
| | | | | or H1006 or | H872 or | or H1006 or |
| | | | | D1009) | N896) | D1009) and |
| | | | | | | (D871* or |
| | | | | | | H872 or N896) |
| OMNI-370 | 94 | 202 | 310 | (D11 or E789 | (D873* or | (D11 or E789 |
| | | | | or H1006 or | H874 or | or H1006 or |
| | | | | D1009) | N898) | D1009) and |
| | | | | | | (D873* or |
| | | | | | | H874 or N898) |
| OMNI-371 | 95 | 203 | 311 | (D13 or E789 | (D881* or | (D13 or E789 |
| | | | | or H1014 or | H882 or | or H1014 or |
| | | | | D1017) | N905) | D1017) and |
| | | | | | | (D881* or |
| | | | | | | H882 or N905) |
| OMNI-372 | 96 | 204 | 312 | (D8 or E746 | (E875* or | (D8 or E746 or |
| | | | | or H1070 or | H876 or | H1070 or |
| | | | | D1073) | N899) | D1073) and |
| | | | | | | (E875* or |
| | | | | | | H876 or N899) |
| OMNI-373 | 97 | 205 | 313 | (D10 or E791 | (D873* or | (D10 or E791 |
| | | | | or H1007 or | H874 or | or H1007 or |
| | | | | D1010) | N898) | D1010) and |
| | | | | | | (D873* or |
| | | | | | | H874 or N898) |
| OMNI-375 | 98 | 206 | 314 | (D10 or E801 | (D886* or | (D10 or E801 |
| | | | | or H1018 or | H887 or | or H1018 or |
| | | | | D1021) | N910) | D1021) and |
| | | | | | | (D886* or |
| | | | | | | H887 or N910) |
| OMNI-376 | 99 | 207 | 315 | (D11 or E784 | (D868* or | (D11 or E784 |
| | | | | or H1000 or | H869 or | or H1000 or |
| | | | | D1003) | N892) | D1003) and |
| | | | | | | (D868* or |
| | | | | | | H869 or N892) |
| OMNI-377 | 100 | 208 | 316 | (D8 or E793 | (D877* or | (D8 or E793 or |
| | | | | or H1013 or | H878 or | H1013 or |
| | | | | D1016) | N902) | D1016) and |
| | | | | | | (D877* or |
| | | | | | | H878 or N902) |
| OMNI-378 | 101 | 209 | 317 | (D25 or E817 | (D901* or | (D25 or E817 |
| | | | | or H1035 or | H902 or | or H1035 or |
| | | | | D1038) | N925) | D1038) and |
| | | | | | | (D901* or |
| | | | | | | H902 or N925) |
| OMNI-380 | 102 | 210 | 318 | (D10 or E733 | (E855* or | (D10 or E733 |
| | | | | or H1023 or | H856 or | or H1023 or |
| | | | | D1026) | N879) | D1026) and |
| | | | | | | (E855* or |
| | | | | | | H856 or N879) |
| OMNI-381 | 103 | 211 | 319 | (D18 or E830 | (D912* or | (D18 or E830 |
| | | | | or H1045 or | H913 or | or H1045 or |
| | | | | D1048) | N936) | D1048) and |
| | | | | | | (D912* or |
| | | | | | | H913 or N936) |
| OMNI-382 | 104 | 212 | 320 | (D8 or E700 | (E824* or | (D8 or E700 or |
| | | | | or H1022 or | H825 or | H1022 or |
| | | | | D1025) | N848) | D1025) and |
| | | | | | | (E824* or |
| | | | | | | H825 or N848) |
| OMNI-383 | 105 | 213 | 321 | (D8 or E738 | (E862* or | (D8 or E738 or |
| | | | | or H1060 or | H863 or | H1060 or |
| | | | | D1063) | N886) | D1063) and |
| | | | | | | (E862* or |
| | | | | | | H863 or N886) |
| OMNI-384 | 106 | 214 | 322 | (D15 or E895 | (D976* or | (D15 or E895 |
| | | | | or H1122 or | H977 or | or H1122 or |
| | | | | D1125) | N1000) | D1125) and |
| | | | | | | (D976* or |
| | | | | | | H977 or |
| | | | | | | N1000) |
| OMNI-385 | 107 | 215 | 323 | (D8 or E731 | (E859* or | (D8 or E731 or |
| | | | | or H1054 or | H860 or | H1054 or |
| | | | | D1057) | N883) | D1057) and |
| | | | | | | (E859* or |
| | | | | | | H860 or N883) |
| OMNI-386 | 108 | 216 | 324 | (D8 or E744 | (E870* or | (D8 or E744 or |
| | | | | or H1068 or | H871 or | H1068 or |
| | | | | D1071) | N894) | D1071) and |
| | | | | | | (E870* or |
| | | | | | | H871 or N894) |

Table 1. OMNI nuclease sequences: Table 1 lists the OMNI name, its corresponding nuclease protein sequence, its native DNA sequence, its human optimized DNA sequence, alternative positions to be substituted to generate a nickase having an inactivated RuvC domain, alternative positions to be substituted to generate a nickase having an inactivated HNH domain, and alternative positions to be substituted to generate a catalytically dead nuclease having inactivated RuvC and HNH domains. Substitution to any other amino acid is permissible for each of the amino acid positions indicated in columns 5-7, except a substitution of aspartic acid (D) to glutamic acid (E) or glutamic acid (E) to aspartic acid (D) in the HNH domain, in order to achieve inactivation.

TABLE 2
OMNI Guide RNA and Scaffold RNA Sequences

| | | OMNI-263 | OMNI-264 |
|---|---|---|---|
| | sgRNA V1 | GUUAUCGCUUCCUUUCgaaa | GUUGUGACUUGCACUCgaaaGUG |
| | sequence | GAAAGGAAGCGAUAAUAAU | UGCUUGCCAUAACAAGCGCAAG |
| | | CGAUAAAUUUCGAGUGGGG | UCGCGCAGGCACUGCCCCGGCG |
| | | CAACGGCGAUCCGGUCUUG | GGCAUCACCCGAUGCCCGCCGG |
| | | UAUCGGGGUAGCCGUCCCC | GGUAUCUCCUUUUUU (SEQ ID |
| | | UAAUUUUUU (SEQ ID NO: | NO: 339) |
| | | 325) | |
| crRNA: tracr | crRNA | GUUAUCGCUUCCUUUC (SEQ | GUUGUGACUUGCACUC (SEQ ID |
| RNA duplex | (Repeat) | ID NO: 326) | NO: 340) |
| V1 sequences | Partial | GUUAUCGCUUCCUUU (SEQ | GUUGUGACUUGCACU (SEQ ID |
| | crRNA 1 | ID NO: 327) | NO: 341) |
| | Partial | GUUAUCGCUUCC (SEQ ID | GUUGUGACUUGC (SEQ ID NO: |
| | crRNA 2 | NO: 328) | 342) |
| | Partial | GUUAUCGCUU (SEQ ID NO: | GUUGUGACUU (SEQ ID NO: 343) |
| | crRNA 3 | 329) | |
| | tracrRNA | GAAAGGAAGCGAUAAU | GUGUGCUUGCCAUAAC (SEQ ID |
| | (Antirepeat) | (SEQ ID NO: 330) | NO: 344) |
| | Partial | AAAGGAAGCGAUAAU (SEQ | GUGUGCUUGCCAUAAC (SEQ ID |
| | tracrRNA 1 | ID NO: 331) | NO: 345) |
| | Partial | GGAAGCGAUAAU (SEQ ID | GCUUGCCAUAAC (SEQ ID NO: |
| | tracrRNA 2 | NO: 332) | 346) |
| | Partial | AAGCGAUAAU (SEQ ID NO: | UUGCCAUAAC (SEQ ID NO: 347) |
| | tracrRNA 3 | 333) | |
| tracrRNA V1 | tracrRNA | AAUCGAUAAAUUUCGAGU | AAGCGCAAGUCGCGC (SEQ ID |
| sequences | Portion 1 | (SEQ ID NO: 334) | NO: 348) |
| | tracrRNA | AAUCGAUAAAUUUCGA | AAGCGCAAGUCGCGC (SEQ ID |
| | Portion 1- | (SEQ ID NO: 335) | NO: 349) |
| | partial | | |
| | tracrRNA | GGGGCAACGGCGAUCCGGU | AGGCACUGCCCCGGCGGGCAUC |
| | Portion 2 | CUUGUAUCGGGGUAGCCGU | ACCCGAUGCCCGCCGGGGUAUC |
| | | CCCCUAAUUUUUU (SEQ ID | UCCUUUUUU (SEQ ID NO: 350) |
| | | NO: 336) | |
| | tracrRNA | GGGGCAACGGCGAUCCGGU | AGGCACUGCCCCGGCGGGCAUC |
| | Portion 2- | CUUGUAUCGGGGUAGCCGU | ACCCGAUGCCCGCCGGGGUAUC |
| | partial | CCCC (SEQ ID NO: 337) | UCCU (SEQ ID NO: 351) |
| | tracrRNA | GGGGCAACGGCGAUCCGGU | AGGCACUGCCCCGGCGGGCAUC |
| | Portion 2- | CUUGUAUCGGGGUAGCCGU | ACCCGAUGCCCGCCGGGGUAUC |
| | without | CCCCUAA (SEQ ID NO: 338) | UCC (SEQ ID NO: 352) |
| | polyT | | |
| | | OMNI-266 | OMNI-268 |
| | sgRNA V1 | GUUAUAGUUGCCUUUCgaaa | GUUUUGAUUUACUCUUAAUgaaa |
| | sequence | GAAAGGCGACUAUAAUAAU | GUUAAGAGUCCAAUCAGAAUUG |
| | | CGAGAAAUUUCGAGUAAGG | ACAAGAGAAUAGUCGGUACCUC |
| | | CUCUAACGUUUACACGUUA | UGCUAAAGCACGUAAAGAUCUC |
| | | UCCGAAAAGCAGCCGGUUC | AUUCUCUAAAACAUUUAAAAAA |
| | | GCCGGUUGCUUCUUUUUUU | UUUUUU (SEQ ID NO: 369) |
| | | (SEQ ID NO: 353) | |
| crRNA: tracr | crRNA | GUUAUAGUUGCCUUUC | GUUUUGAUUUACUCUUAAU |
| RNA duplex | (Repeat) | (SEQ ID NO: 354) | (SEQ ID NO: 370) |
| V1 sequences | Partial | GUUAUAGUUGCCUUU (SEQ | GUUUUGAUUUACUCU (SEQ ID |
| | crRNA 1 | ID NO: 355) | NO: 371) |
| | Partial | GUUAUAGUUGCC (SEQ ID | GUUUUGAUUUAC (SEQ ID NO: |
| | crRNA 2 | NO: 356) | 372) |
| | Partial | GUUAUAGUUG (SEQ ID NO: | GUUUUGAUUU (SEQ ID NO: 373) |
| | crRNA 3 | 357) | |
| | tracrRNA | GAAAGGCGACUAUAAU | GUUAAGAGUCCAAUCAGAAU |
| | (Antirepeat) | (SEQ ID NO: 358) | (SEQ ID NO: 374) |
| | Partial | AAAGGCGACUAUAAU (SEQ | AGAGUCCAAUCAGAAU (SEQ ID |
| | tracrRNA 1 | ID NO: 359) | NO: 375) |
| | Partial | GGCGACUAUAAU (SEQ ID | GUCCAAUCAGAAU (SEQ ID NO: |
| | tracrRNA 2 | NO: 360) | 376) |
| | Partial | CGACUAUAAU (SEQ ID NO: | CCAAUCAGAAU (SEQ ID NO: 377) |
| | tracrRNA 3 | 361) | |
| tracrRNA V1 | tracrRNA | AAUCGAGAAAUUUCGAGUA | UGACAAGAGAAUAGUCGGUACC |
| sequences | Portion 1 | A (SEQ ID NO: 362) | UCUGCUAAAGCACGUAAAGAUC |
| | | | UCAUUCUCUAAAACAUUUAAAA |
| | | | AAUUUUUU (SEQ ID NO: 378) |
| | tracrRNA | AAUCGAGAAAUUUCGA | AGAGAAUAGUCGGUACCUCUGC |
| | Portion 1- | (SEQ ID NO: 363) | UAAAGCACGUAAAGAUCUCAUU |
| | partial | | CUCU (SEQ ID NO: 379) |
| | tracrRNA | — | UGACAAGAGAAUAGUCGGUACC |
| | Portion 1- | | UCUGCUAAAGCACGUAAAGAUC |
| | without | | UCAUUCUCUAAAACAUUUAAAA |
| | polyT | | AA (SEQ ID NO: 380) |
| | tracrRNA | GGCUCUAACGUUUACACGU | |
| | Portion 2 | UAUCCGAA (SEQ ID NO: 364) | |
| | tracrRNA | GGCUCUAACGUUUACACGU | — |
| | Portion 2- | UAUCC (SEQ ID NO: 365) | |
| | partial | | |
| | tracrRNA | AAGCAGCCGGUUCGCCGGU | — |
| | Portion 3 | UGCUUCUUUUUUU (SEQ ID | |
| | | NO: 366) | |
| | tracrRNA | AAGCAGCCGGUUCGCCGGU | — |
| | Portion 3- | UGCUU (SEQ ID NO: 367) | |
| | partial | | |
| | tracrRNA | AAGCAGCCGGUUCGCCGGU | |
| | Portion 3- | UGCUUC (SEQ ID NO: 368) | |
| | without | | |
| | polyT | | |
| | | OMNI-269 | OMNI-271 |
| | sgRNA V1 | GCUAUAGUUUCCUUUCGAA | GCUGGGGCUUGUAGAGgaaaCUC |
| | sequence | gaaaUUCGAAACGUUACUAU | UACAAGUCCUGGUAAAGGAUUU |
| | | AGUAAGAAAUUUUCGAAAA | GCUGGCUACUUUCUGCGGAAAG |
| | | GUUCUGCCUAAUACUAUUA | UCCAUUCGGGCGGCUUCAUAAG |
| | | UGUAUUAGGCAUCUUUUUU | CCGUCUUUUUU (SEQ ID NO: 396) |
| | | (SEQ ID NO: 381) | |
| crRNA: tracr | crRNA | GCUAUAGUUUCCUUUCGAA | GCUGGGGCUUGUAGAG (SEQ ID |
| RNA duplex | (Repeat) | (SEQ ID NO: 382) | NO: 397) |
| V1 sequences | Partial | GCUAUAGUUUCCUUU (SEQ | GCUGGGGCUUGUAGA (SEQ ID |
| | crRNA 1 | ID NO: 383) | NO: 398) |
| | Partial | GCUAUAGUUUCC (SEQ ID | GCUGGGGCUUGU (SEQ ID NO: |
| | crRNA 2 | NO: 384) | 399) |
| | Partial | GCUAUAGUUU (SEQ ID NO: | GCUGGGGCUU |
| | crRNA 3 | 385) | (SEQ ID NO: 400) |
| | tracrRNA | UUCGAAACGUUACUAUAGU | CUCUACAAGUCCUGGU (SEQ ID |
| | (Antirepeat) | (SEQ ID NO: 386) | NO: 401) |
| | Partial | AAACGUUACUAUAGU (SEQ | UCUACAAGUCCUGGU (SEQ ID |
| | tracrRNA 1 | ID NO: 387) | NO: 402) |
| | Partial | CGUUACUAUAGU (SEQ ID | ACAAGUCCUGGU (SEQ ID NO: |
| | tracrRNA 2 | NO: 388) | 403) |
| | Partial | UUACUAUAGU (SEQ ID NO: | AAGUCCUGGU (SEQ ID NO: 404) |
| | tracrRNA 3 | 389) | |
| tracrRNA V1 | tracrRNA | AAGAAAUUUUCGAAAAGUU | AAAGGAUUUGCUGGCUACUUUC |
| sequences | Portion 1 | CUGCCUAAUACUAUUAUGU | UGCGGAAAGUCCAUUC (SEQ ID |
| | | AUUAGGCAUCUUUUUU | NO: 405) |
| | | (SEQ ID NO: 390) | |
| | tracrRNA | GAAAAGUUCUGCCUAAUAC | AAAGGAUUUGCUGGCUACUUUC |
| | Portion 1- | UAUUAUGUAUUAGGCAUCU | UGCGGAAAGUCC (SEQ ID NO: |
| | partial | UUUU (SEQ ID NO: 391) | 406) |
| | tracrRNA | AAGAAAUUUUCGAAAAGUU | |
| | Portion 1- | CUGCCUAAUACUAUUAUGU | |
| | without | AUUAGGCAUC (SEQ ID NO: | |
| | polyT | 392) | |
| | tracrRNA | — | GGGCGGCUUCAUAAGCCGUCUU |
| | Portion 2 | | UUUU (SEQ ID NO: 407) |
| | tracrRNA | — | GGGCGGCUUCAUAAGCCGUCU |
| | Portion 2- | | (SEQ ID NO: 408) |
| | partial | | |
| | tracrRNA | — | GGGCGGCUUCAUAAGCCGUC |
| | Portion 2- | | (SEQ ID NO: 409) |
| | without | | |
| | polyT | | |
| | sgRNA V2 | GCUAUAGUUUCCUUUCGAA | — |
| | sequence | gaaaUUCGAAACGUUACUAU | |
| | | AGUAAGAAAUUCUCGAAAA | |
| | | GUUCUGCCUAAUACUAUUA | |
| | | UGUAUUAGGCAUCUUUUUU | |
| | | (SEQ ID NO: 393) | |
| tracrRNA V2 | tracrRNA | AAGAAAUUCUCGAAAAGUU | — |
| sequences | Portion 1 | CUGCCUAAUACUAUUAUGU | |
| | | AUUAGGCAUCUUUUUU | |
| | | (SEQ ID NO: 394) | |
| | tracrRNA | AAGAAAUUCUCGAAAAGUU | — |
| | Portion 1- | CUGCCUAAUACUAUUAUGU | |
| | without | AUUAGGCAUC (SEQ ID NO: | |
| | polyT | 395) | |
| | | OMNI-274 | OMNI-275 |
| | sgRNA V1 | GUUAUAGUUUCCUUUCGAA | GUUUUGAUUUGAGUgaaaACUCA |
| | sequence | gaaaUUUGAAACGUUACUAU | AAUCUUAACUGAUGAAUGCGGA |
| | | AAUAAGAAAGUUUCGUGAA | UAUACAGCACCGAAACUUUAUU |
| | | GUUCUGUCCGAUAAUUUUA | GUUUCGCCUGUAUAUCCGUUUU |
| | | UCGGACAUCUUCUUUUUGC | CGUUUUUU (SEQ ID NO: 434) |
| | | GGCUUUUUU (SEQ ID NO: | |
| | | 410) | |
| crRNA: tracr | crRNA | GUUAUAGUUUCCUUUCGAA | GUUUUGAUUUGAGU (SEQ ID NO: |
| RNA duplex | (Repeat) | (SEQ ID NO: 411) | 435) |
| V1 sequences | Partial | GUUAUAGUUUCCUUU (SEQ | — |
| | crRNA 1 | ID NO: 412) | |
| | Partial | GUUAUAGUUUCC (SEQ ID | GUUUUGAUUUGA (SEQ ID NO: |
| | crRNA 2 | NO: 413) | 436) |
| | Partial | GUUAUAGUUU (SEQ ID NO: | GUUUUGAUUU (SEQ ID NO: 437) |
| | crRNA 3 | 414) | |
| | tracrRNA | UUUGAAACGUUACUAUAAU | ACUCAAAUCUUAAC (SEQ ID NO: |
| | (Antirepeat) | (SEQ ID NO: 415) | 438) |
| | Partial | AAACGUUACUAUAAU (SEQ | — |
| | tracrRNA 1 | ID NO: 416) | |
| | Partial | CGUUACUAUAAU (SEQ ID | UCAAAUCUUAAC (SEQ ID NO: |
| | tracrRNA 2 | NO: 417) | 439) |
| | Partial | UUACUAUAAU (SEQ ID NO: | AAAUCUUAAC (SEQ ID NO: 440) |
| | tracrRNA 3 | 418) | |
| tracrRNA V1 | tracrRNA | AAGAAAGUUUCGUGAAGUU | UGAUGAAUGCGGAUAUACAGCA |
| sequences | Portion 1 | CUGUCCGAUAAUUUUAUCG | CCGAAACUUUAUUGUUUCGCCU |
| | | GACAUCUUCUUUUUGCGGC | GUAUAUCCGUUUUCGUUUUUU |
| | | UUUUUU (SEQ ID NO: 419) | (SEQ ID NO: 441) |
| | tracrRNA | AAGAAAGUUUCGUGAAGUU | GAUGAAUGCGGAUAUACAGCAC |
| | Portion 1- | CUGUCCGAUAAUUUUAUCG | CGAAACUUUAUUGUUUCGCCUG |
| | partial | GACAUCUUCUUUUUGCGGC | UAUAUCCGUUUUCGUU (SEQ ID |
| | | UUUUUU (SEQ ID NO: 420) | NO: 442) |
| | tracrRNA | AAGAAAGUUUCGUGAAGUU | UGAUGAAUGCGGAUAUACAGCA |
| | Portion 1- | CUGUCCGAUAAUUUUAUCG | CCGAAACUUUAUUGUUUCGCCU |
| | without | GACAUCUUCUUUUUGCGGC | GUAUAUCCGUUUUCG (SEQ ID |
| | polyT | (SEQ ID NO: 421) | NO: 443) |
| | sgRNA V2 | GUUAUAGUUUCCUUUCGAA | — |
| | sequence | gaaaUUUGAAACGUUACUAU | |
| | | AAUAAGAAAGUUUCGUGAA | |
| | | GUUCUGUCCGAUAAUCUUA | |
| | | UCGGACAUCUUCUUUCUGC | |
| | | GGCUUUUUU (SEQ ID NO: | |
| | | 422) | |
| tracrRNA V2 | tracrRNA | AAGAAAGUUUCGUGAAGUU | |
| sequences | Portion 1 | CUGUCCGAUAAUCUUAUCG | |
| | | GACAUCUUCUUUCUGCGGC | |
| | | UUUUUU (SEQ ID NO: 423) | |
| | tracrRNA | AAGAAAGUUUCGUGAAGUU | — |
| | Portion 1- | CUGUCCGAUAAUCUUAUCG | |
| | partial | GACAUCUUCUUUCUGCGGC | |
| | | UUUUUU (SEQ ID NO: 424) | |
| | tracrRNA | AAGAAAGUUUCGUGAAGUU | — |
| | Portion 1- | CUGUCCGAUAAUCUUAUCG | |
| | without | GACAUCUUCUUUCUGCGGC | |
| | polyT | (SEQ ID NO: 425) | |
| | sgRNA V3 | GUUAUAGUUUCCUUUCGAA | GUUUUGAUUUGAGUgaaaACUCA |
| | sequence | gaaaUUUGAAACGUUACUAU | AAUCUUAACUGAUGAAUGCGGA |
| | | AAUAAGAAAGUUUCGUGAA | UAUACAGCACCGAAACUUUAUU |
| | | GUUCUGUCCGAUAAUUUUA | GUUUCGCCUGUAUAUCCGUUUU |
| | | UCGGACAUCUUCUUUUUU | UU (SEQ ID NO: 444) |
| | | (SEQ ID NO: 426) | |
| tracrRNA V3 | tracrRNA | AAGAAAGUUUCGUGAAGUU | UGAUGAAUGCGGAUAUACAGCA |
| sequences | Portion 1 | CUGUCCGAUAAUUUUAUCG | CCGAAACUUUAUUGUUUCGCCU |
| | | GACAUCUUCUUUUUU (SEQ | GUAUAUCCGUUUUUU (SEQ ID |
| | | ID NO: 427) | NO: 445) |
| | tracrRNA | GAAGUUCUGUCCGAUAAUU | GAAUGCGGAUAUACAGCACCGA |
| | Portion 1- | UUAUCGGACAUCUUC (SEQ | AACUUUAUUGUUUCGCCUGUAU |
| | partial | ID NO: 428) | AUCCGUUUUU (SEQ ID NO: 446) |
| | tracrRNA | AAGAAAGUUUCGUGAAGUU | UGAUGAAUGCGGAUAUACAGCA |
| | Portion 1- | CUGUCCGAUAAUUUUAUCG | CCGAAACUUUAUUGUUUCGCCU |
| | without | GACAUCUUC (SEQ ID NO: | GUAUAUCCG (SEQ ID NO: 447) |
| | polyT | 429) | |
| | sgRNA V4 | GUUAUAGUUUCCUUUCGAA | — |
| | sequence | gaaaUUUGAAACGUUACUAU | |
| | | AAUAAGAAAGUUUCGUGAA | |
| | | GUUCUGUCCGAUAAUCUUA | |
| | | UCGGACAUCUUCUUUUUU | |
| | | (SEQ ID NO: 430) | |
| tracrRNA V4 | tracrRNA | AAGAAAGUUUCGUGAAGUU | — |
| sequences | Portion 1 | CUGUCCGAUAAUCUUAUCG | |
| | | GACAUCUUCUUUUUU (SEQ | |
| | | ID NO: 431) | |
| | tracrRNA | GAAGUUCUGUCCGAUAAUC | — |
| | Portion 1- | UUAUCGGACAUCUUC (SEQ | |
| | partial | ID NO: 432) | |
| | tracrRNA | AAGAAAGUUUCGUGAAGUU | — |
| | Portion 1- | CUGUCCGAUAAUCUUAUCG | |
| | without | GACAUCUUC (SEQ ID NO: | |
| | polyT | 433) | |
| | | OMNI-276 | OMNI-278 |
| | sgRNA V1 | GUCAUGGGUUCCCUUCgaaa | GUUUGAGAACCUUGUAAgaaaUU |
| | sequence | GAAGGGAACCCAUGAUAAC | ACAAGGUGAGUGCAAAUAAGGA |
| | | GCUGAAGGCAGAACCUGUC | UUUAUCCGAAAUAGUCUGCCCG |
| | | UUCAGCGCCGCACAGCUCU | CAUCGUGCGGCAAUCAUUUUUU |
| | | GCUCCGGCCUCAAUGGCCG | (SEQ ID NO: 462) |
| | | GAGCAUCUGUUUUUUU | |
| | | (SEQ ID NO: 448) | |
| crRNA: tracr | crRNA | GUCAUGGGUUCCCUUC (SEQ | GUUUGAGAACCUUGUAA (SEQ ID |
| RNA duplex | (Repeat) | ID NO: 449) | NO: 463) |
| V1 sequences | Partial | GUCAUGGGUUCCCUU (SEQ | GUUUGAGAACCUUGU (SEQ ID |
| | crRNA 1 | ID NO: 450) | NO: 464) |
| | Partial | GUCAUGGGUUCC (SEQ ID | GUUUGAGAACCU (SEQ ID NO: |
| | crRNA 2 | NO: 451) | 465) |
| | Partial | GUCAUGGGUU (SEQ ID NO: | GUUUGAGAAC (SEQ ID NO: 466) |
| | crRNA 3 | 452) | |
| | tracrRNA | GAAGGGAACCCAUGAU | UUACAAGGUGAGUGCAAAU |
| | (Antirepeat) | (SEQ ID NO: 453) | (SEQ ID NO: 467) |
| | Partial | AAGGGAACCCAUGAU (SEQ | ACAAGGUGAGUGCAAAU (SEQ ID |
| | tracrRNA 1 | ID NO: 454) | NO: 468) |
| | Partial | GGAACCCAUGAU (SEQ ID | AGGUGAGUGCAAAU (SEQ ID NO: |
| | tracrRNA 2 | NO: 455) | 469) |
| | Partial | AACCCAUGAU (SEQ ID NO: | GUGAGUGCAAAU (SEQ ID NO: |
| | tracrRNA 3 | 456) | 470) |
| tracrRNA V1 | tracrRNA | AACGCUGAAGGCAGAACCU | AAGGAUUUAUCC (SEQ ID NO: |
| sequences | Portion 1 | GUCUUCAGCGCCGC (SEQ ID | 471) |
| | | NO: 457) | |
| | tracrRNA | AACGCUGAAGGCAGAACCU | AAGGAUUUAUCC (SEQ ID NO: |
| | Portion 1- | GUCUUCAGCG (SEQ ID NO: | 472) |
| | partial | 458) | |
| | tracrRNA | ACAGCUCUGCUCCGGCCUC | GAAAUAGUCUGCCCGCAUCGUG |
| | Portion 2 | AAUGGCCGGAGCAUCUGUU | CGGCAAUCAUUUUUU (SEQ ID |
| | | UUUUU (SEQ ID NO: 459) | NO: 473) |
| | tracrRNA | ACAGCUCUGCUCCGGCCUC | GAAAUAGUCUGCCCGCAUCGUG |
| | Portion 2- | AAUGGCCGGAGCAUCUGU | CGGCAAUCAUUUU (SEQ ID NO: |
| | partial | (SEQ ID NO: 460) | 474) |
| | tracrRNA | ACAGCUCUGCUCCGGCCUC | GAAAUAGUCUGCCCGCAUCGUG |
| | Portion 2- | AAUGGCCGGAGCAUCUG | CGGCAAUCA (SEQ ID NO: 475) |
| | without | (SEQ ID NO: 461) | |
| | polyT | | |
| | | OMNI-279 | OMNI-280 |
| | sgRNA V1 | GUUGUGAAUUGCUUUCgaaa | GUUUUAGUACUCUGUUGgaaaCA |
| | sequence | GAAAGCAAUUCACAAUAAG | ACAAGAGUUCUAAGAUAAGACC |
| | | GAUUAUUCCGUUGUGAAAA | UUAUGUGUCGUAGGGUAUAGCG |
| | | CAUCCAGGGCGGGGCAACU | GUAUCCCGAAUAAUUCCGCUCU |
| | | CGCCCUUUUUU (SEQ ID NO: | UUGAAAUCAACGCCGUUGCAUU |
| | | 476) | UGCGACGGCUUUUUU (SEQ ID |
| | | | NO: 492) |
| crRNA: tracr | crRNA | GUUGUGAAUUGCUUUC | GUUUUAGUACUCUGUUG (SEQ ID |
| RNA duplex | (Repeat) | (SEQ ID NO: 477) | NO: 493) |
| V1 sequences | Partial | GUUGUGAAUUGCUUU (SEQ | GUUUUAGUACUCUGU (SEQ ID |
| | crRNA 1 | ID NO: 478) | NO: 494) |
| | Partial | GUUGUGAAUUGC (SEQ ID | GUUUUAGUACUC (SEQ ID NO: |
| | crRNA 2 | NO: 479) | 495) |
| | Partial | GUUGUGAAUU (SEQ ID NO: | GUUUUAGUAC (SEQ ID NO: 496) |
| | crRNA 3 | 480) | |
| | tracrRNA | GAAAGCAAUUCACAAU | CAACAAGAGUUCUAAGAU (SEQ |
| | (Antirepeat) | (SEQ ID NO: 481) | ID NO: 497) |
| | Partial | AAAGCAAUUCACAAU (SEQ | ACAAGAGUUCUAAGAU (SEQ ID |
| | tracrRNA 1 | ID NO: 482) | NO: 498) |
| | Partial | GCAAUUCACAAU (SEQ ID | AGAGUUCUAAGAU (SEQ ID NO: |
| | tracrRNA 2 | NO: 483) | 499) |
| | Partial | AAUUCACAAU (SEQ ID NO: | GUUCUAAGAU (SEQ ID NO: 500) |
| | tracrRNA 3 | 484) | |
| tracrRNA V1 | tracrRNA | AAGGAUUAUUCCGU (SEQ | AAGACCUUAUGUGUCGUAGGGU |
| sequences | Portion 1 | ID NO: 485) | AU (SEQ ID NO: 501) |
| | tracrRNA | AAGGAUUAUUCC (SEQ ID | AAGACCUUAUGUGUCGUAGGGU |
| | Portion 1- | NO: 486) | (SEQ ID NO: 502) |
| | partial | | |
| | tracrRNA | UGUGAAAACAUCC (SEQ ID | AGCGGUAUCCCGAAUAAUUCCG |
| | Portion 2 | NO: 487) | CUCUUUGAAAUCAAC (SEQ ID |
| | | | NO: 503) |
| | tracrRNA | UGUGAAAACA (SEQ ID NO: | AGCGGUAUCCCGAAUAAUUCCG |
| | Portion 2- | 488) | CU (SEQ ID NO: 504) |
| | partial | | |
| | tracrRNA | AGGGCGGGGCAACUCGCCC | GCCGUUGCAUUUGCGACGGCUU |
| | Portion 3 | UUUUUU (SEQ ID NO: 489) | UUUU (SEQ ID NO: 505) |
| | tracrRNA | AGGGCGGGGCAACUCGCCC | GCCGUUGCAUUUGCGACGGC |
| | Portion 3- | U (SEQ ID NO: 490) | (SEQ ID NO: 506) |
| | partial | | |
| | tracrRNA | AGGGCGGGGCAACUCGCCC | GCCGUUGCAUUUGCGACGGC |
| | Portion 3- | (SEQ ID NO: 491) | (SEQ ID NO: 507) |
| | without | | |
| | polyT | | |
| | sgRNA V2 | — | GUCUUAGUACUCUGUUGgaaaCA |
| | sequence | | ACAAGAGUUCUAAGAUAAGACC |
| | | | UUAUGUGUCGUAGGGUAUAGCG |
| | | | GUAUCCCGAAUAAUUCCGCUCU |
| | | | UUGAAAUCAACGCCGUUGCAUU |
| | | | UGCGACGGCUUUUUU (SEQ ID |
| | | | NO: 508) |
| crRNA: tracr | crRNA | — | GUCUUAGUACUCUGUUG (SEQ ID |
| RNA duplex | (Repeat) | | NO: 509) |
| V2 sequences | Partial | — | GUCUUAGUACUCUGU (SEQ ID |
| | crRNA 1 | | NO: 510) |
| | Partial | — | GUCUUAGUACUC (SEQ ID NO: |
| | crRNA 2 | | 511) |
| | Partial | — | GUCUUAGUAC (SEQ ID NO: 512) |
| | crRNA 3 | | |
| | | OMNI-281 | OMNI-283 |
| | sgRNA V1 | GUUUUAGUACUCUGUAAUU | GCUUUGCCAUAGUUCAgaaaGAAC |
| | sequence | gaaaAAUUACAGAAUCUACU | UAUGACAAAGUUAGAUAACGCA |
| | | AAAACAAGACAAUAUGUCG | GACCGCGUCCCUAACCGCCAUGC |
| | | UGUUUAGCCCAUCAAUUUA | GGUUACACCGUGUUAAAAAGCG |
| | | UUGGUGGGCUUUUUU (SEQ | UUGUUUAAGAGGUGCGACUUCA |
| | | ID NO: 513) | CGGUUGCGCCUCUUUUUU (SEQ |
| | | | ID NO: 536) |
| crRNA: tracr | crRNA | GUUUUAGUACUCUGUAAUU | GCUUUGCCAUAGUUCA (SEQ ID |
| RNA duplex | (Repeat) | (SEQ ID NO: 514) | NO: 537) |
| V1 sequences | Partial | GUUUUAGUACUCUGU (SEQ | GCUUUGCCAUAGUUC (SEQ ID |
| | crRNA 1 | ID NO: 515) | NO: 538) |
| | Partial | GUUUUAGUACUC (SEQ ID | GCUUUGCCAUAG (SEQ ID NO: |
| | crRNA 2 | NO: 516) | 539) |
| | Partial | GUUUUAGUAC (SEQ ID NO: | GCUUUGCCAU (SEQ ID NO: 540) |
| | crRNA 3 | 517) | |
| | tracrRNA | AAUUACAGAAUCUACUAAA | GAACUAUGACAAAGU (SEQ ID |
| | (Antirepeat) | AC (SEQ ID NO: 518) | NO: 541) |
| | Partial | ACAGAAUCUACUAAAAC | GAACUAUGACAAAGU (SEQ ID |
| | tracrRNA 1 | (SEQ ID NO: 519) | NO: 542) |
| | Partial | GAAUCUACUAAAAC (SEQ ID | CUAUGACAAAGU (SEQ ID NO: |
| | tracrRNA 2 | NO: 520) | 543) |
| | Partial | AUCUACUAAAAC (SEQ ID | AUGACAAAGU (SEQ ID NO: 544) |
| | tracrRNA 3 | NO: 521) | |
| tracrRNA V1 | tracrRNA | AAGACAAUAUGUCGUGUUU | UAGAUAACGCAGACCGCGUCCC |
| sequences | Portion 1 | (SEQ ID NO: 522) | UAACCGCCAUGCGGUUACACCG |
| | | | UGUUAAAAAGCGUUGUUUA |
| | | | (SEQ ID NO: 545) |
| | tracrRNA | AAGACAAUAUGUC (SEQ ID | UAGAUAACGCAGACCGCGUCCC |
| | Portion 1- | NO: 523) | UAACCGCCAUGCGGUUACACCG |
| | partial | | UGUUAAAAAGCGUUGUUUA |
| | | | (SEQ ID NO: 546) |
| | tracrRNA | AGCCCAUCAAUUUAUUGGU | AGAGGUGCGACUUCACGGUUGC |
| | Portion 2 | GGGCUUUUUU (SEQ ID NO: | GCCUCUUUUUU (SEQ ID NO: 547) |
| | | 524) | |
| | tracrRNA | AGCCCAUCAAUUUAUUGGU | AGAGGUGCGACUUCACGGUUGC |
| | Portion 2- | GGGCU (SEQ ID NO: 525) | GCCUCU (SEQ ID NO: 548) |
| | partial | | |
| | tracrRNA | AGCCCAUCAAUUUAUUGGU | AGAGGUGCGACUUCACGGUUGC |
| | Portion 2- | GGGC (SEQ ID NO: 526) | GCCUC (SEQ ID NO: 549) |
| | without | | |
| | polyT | | |
| | sgRNA V2 | GUUCUAGUACUCUGUAAUU | — |
| | sequence | gaaaAAUUACAGAAUCUACU | |
| | | AGAACAAGACAAUAUGUCG | |
| | | UGUUUAGCCCAUCAAUUUA | |
| | | UUGGUGGGCUUUUUU (SEQ | |
| | | ID NO: 527) | |
| crRNA: tracr | crRNA | GUUCUAGUACUCUGUAAUU | — |
| RNA duplex | (Repeat) | (SEQ ID NO: 528) | |
| V2 sequences | Partial | GUUCUAGUACUCUGU (SEQ | — |
| | crRNA 1 | ID NO: 529) | |
| | Partial | GUUCUAGUACUC (SEQ ID | — |
| | crRNA 2 | NO: 530) | |
| | Partial | GUUCUAGUAC (SEQ ID NO: | — |
| | crRNA 3 | 531) | |
| | tracrRNA | AAUUACAGAAUCUACUAGA | — |
| | (Antirepeat) | AC (SEQ ID NO: 532) | |
| | Partial | ACAGAAUCUACUAGAAC | — |
| | tracrRNA 1 | (SEQ ID NO: 533) | |
| | Partial | GAAUCUACUAGAAC (SEQ ID | — |
| | tracrRNA 2 | NO: 534) | |
| | Partial | AUCUACUAGAAC (SEQ ID | — |
| | tracrRNA 3 | NO: 535) | |
| | | OMNI-284 | OMNI-286 |
| | sgRNA V1 | GUUAUCGCUUCCUUUgaaaA | GUUGUAGUUCCCUAUUUAUgaaa |
| | sequence | AAGGAAGCCGAUAAUAAUC | GUAAAUAGGUUACUACAAUAAG |
| | | GAAACGAAAGUUUUCCGAG | GCCCUUGCGCAAGCAUGGUGCC |
| | | UGGGGCUCCGGCGAUCCGG | GCAACUGGAAGGUGCUGUGCGA |
| | | UCUUGUAUCGGGGUAGCCG | GUCACGGCACUUUUUU (SEQ ID |
| | | UCCCCUCAGAAGAAAAGGG | NO: 576) |
| | | GGCUGACCGCGCGUCGCCC | |
| | | CCUUUUCAUUUUUU (SEQ ID | |
| | | NO: 550) | |
| crRNA: tracr | crRNA | GUUAUCGCUUCCUUU (SEQ | GUUGUAGUUCCCUAUUUAU |
| RNA duplex | (Repeat) | ID NO: 551) | (SEQ ID NO: 577) |
| V1 sequences | Partial | — | GUUGUAGUUCCCUAU (SEQ ID |
| | crRNA 1 | | NO: 578) |
| | Partial | GUUAUCGCUUCC (SEQ ID | GUUGUAGUUCCC (SEQ ID NO: |
| | crRNA 2 | NO: 552) | 579) |
| | Partial | GUUAUCGCUU (SEQ ID NO: | GUUGUAGUUC (SEQ ID NO: 580) |
| | crRNA 3 | 553) | |
| | tracrRNA | AAAGGAAGCCGAUAAU | GUAAAUAGGUUACUACAAU |
| | (Antirepeat) | (SEQ ID NO: 554) | (SEQ ID NO: 581) |
| | Partial | — | AUAGGUUACUACAAU (SEQ ID |
| | tracrRNA 1 | | NO: 582) |
| | Partial | GGAAGCCGAUAAU (SEQ ID | GGUUACUACAAU (SEQ ID NO: |
| | tracrRNA 2 | NO: 555) | 583) |
| | Partial | AAGCCGAUAAU (SEQ ID NO: | UUACUACAAU (SEQ ID NO: 584) |
| | tracrRNA 3 | 556) | |
| tracrRNA V1 | tracrRNA | AAUCGAAACGAAAGUUUUC | AAGGCCCUUGCGCAAGCAUGGU |
| sequences | Portion 1 | C (SEQ ID NO: 557) | GCCGCAACU (SEQ ID NO: 585) |
| | tracrRNA | AAUCGAAACGAAAGUUUU | AAGGCCCUUGCGCAAGCAUGGU |
| | Portion 1- | (SEQ ID NO: 558) | GCC (SEQ ID NO: 586) |
| | partial | | |
| | tracrRNA | GAGUGGGGCUCCGGCGAUC | GGAAGGUGCUGUGCGAGUCACG |
| | Portion 2 | CGGUCUUGUAUCGGGGUAG | GCACUUUUUU (SEQ ID NO: 587) |
| | | CCGUCCCCUCAGAA (SEQ ID | |
| | | NO: 559) | |
| | tracrRNA | GAGUGGGGCUCCGGCGAUC | GGAAGGUGCUGUGCGAGUCACG |
| | Portion 2- | CGGUCUUGUAUCGGGGUAG | GCACUUUUU (SEQ ID NO: 588) |
| | partial | CCGUCCCCUC (SEQ ID NO: | |
| | | 560) | |
| | tracrRNA | — | GGAAGGUGCUGUGCGAGUCACG |
| | Portion 2- | | GCAC (SEQ ID NO: 589) |
| | without | | |
| | polyT | | |
| | tracrRNA | GAAAAGGGGGCUGACCGCG | — |
| | Portion 3 | CGUCGCCCCCUUUUCAUUU | |
| | | UUU (SEQ ID NO: 561) | |
| | tracrRNA | GAAAAGGGGGCUGACCGCG | — |
| | Portion 3- | CGUCGCCCCCUUUUC (SEQ | |
| | partial | ID NO: 562) | |
| | tracrRNA | GAAAAGGGGGCUGACCGCG | — |
| | Portion 3- | CGUCGCCCCCUUUUCA (SEQ | |
| | without | ID NO: 563) | |
| | polyT | | |
| | sgRNA V2 | GUUAUCGCUUCCUUUgaaaA | — |
| | sequence | AAGGAAGCCGAUAAUAAUC | |
| | | GAAACGAAAGUUUCCCGAG | |
| | | UGGGGCUCCGGCGAUCCGG | |
| | | UCUUGUAUCGGGGUAGCCG | |
| | | UCCCCUCAGAAGAGAAGGG | |
| | | GGCUGACCGCGCGUCGCCC | |
| | | CCUUCUCAUUUUUU (SEQ ID | |
| | | NO: 564) | |
| tracrRNA V2 | tracrRNA | AAUCGAAACGAAAGUUUCC | — |
| sequences | Portion 1 | C (SEQ ID NO: 565) | |
| | tracrRNA | AAUCGAAACGAAAGUUUC | |
| | Portion 1- | (SEQ ID NO: 566) | |
| | partial | | |
| | tracrRNA | GAGAAGGGGGCUGACCGCG | — |
| | Portion 3 | CGUCGCCCCCUUCUCAUUU | |
| | | UUU (SEQ ID NO: 567) | |
| | tracrRNA | GAGAAGGGGGCUGACCGCG | — |
| | Portion 3- | CGUCGCCCCCUUCUC (SEQ | |
| | partial | ID NO: 568) | |
| | tracrRNA | GAGAAGGGGGCUGACCGCG | — |
| | Portion 3- | CGUCGCCCCCUUCUCA (SEQ | |
| | without | ID NO: 569) | |
| | polyT | | |
| | sgRNA V3 | GUUAUCGCUUCCUUUgaaaA | GUUGUAGUUCCCUAUUUAUgaaa |
| | sequence | AAGGAAGCCGAUAAUAAUC | GUAAAUAGGUUACUACAAUAAG |
| | | GAAACGAAAGUUUUCCGAG | GCCCUUGCGCAAGCAUGGUGCC |
| | | UGGGGCUCCGGCGAUCCGG | GCAACUGGAAGGUGCUGUGCGA |
| | | UCUUGUAUCGGGGUAGCCG | GUCACGGCACUUUUGCUUUUUU |
| | | UCCCCUCAGAAGAAAAGGG | (SEQ ID NO: 590) |
| | | GGCUGACCGCGCGUCGCCC | |
| | | CCUUUUUU (SEQ ID NO: 570) | |
| tracrRNA V3 | tracrRNA | — | AAGGCCCUUGCGCAAGCAUGGU |
| sequences | Portion 1 | | GCC (SEQ ID NO: 591) |
| | tracrRNA | GAGUGGGGCUCCGGCGAUC | GCAACUGGAAGGUGCUGUGCGA |
| | Portion 2 | CGGUCUUGUAUCGGGGUAG | GUCACGGCACUUUUGCUUUUUU |
| | | CCGUCCCCUCAGA (SEQ ID | (SEQ ID NO: 592) |
| | | NO: 571) | |
| | tracrRNA | — | GCAACUGGAAGGUGCUGUGCGA |
| | Portion 2- | | GUCACGGCACUUUUGC (SEQ ID |
| | partial | | NO: 593) |
| | tracrRNA | — | GCAACUGGAAGGUGCUGUGCGA |
| | Portion 2- | | GUCACGGCACUUUUGC (SEQ ID |
| | without | | NO: 594) |
| | polyT | | |
| | tracrRNA | AGAAAAGGGGGCUGACCGC | — |
| | Portion 3 | GCGUCGCCCCCUUUUUU | |
| | | (SEQ ID NO: 572) | |
| | tracrRNA | AGAAAAGGGGGCUGACCGC | — |
| | Portion 3- | GCGUCGCCCCCUUUUUU | |
| | partial | (SEQ ID NO: 573) | |
| | tracrRNA | AGAAAAGGGGGCUGACCGC | — |
| | Portion 3- | GCGUCGCCCCC (SEQ ID NO: | |
| | without | 574) | |
| | polyT | | |
| | sgRNA V4 | GUUAUCGCUUCCUUUgaaaA | GUUGUAGUUCCCUAUUUAUgaaa |
| | sequence | AAGGAAGCCGAUAAUAAUC | GUAAAUAGGUUACUACAAUAAG |
| | | GAAACGAAAGUUUCCCGAG | GCCCUUGCGCAAGCAUGGUGCC |
| | | UGGGGCUCCGGCGAUCCGG | GCAACUGGAAGGUGCUGUGCGA |
| | | UCUUGUAUCGGGGUAGCCG | GUCACGGCACCUUUGCUUUUUU |
| | | UCCCCUCAGAAGAAAAGGG | (SEQ ID NO: 595) |
| | | GGCUGACCGCGCGUCGCCC | |
| | | CCUUUUUU (SEQ ID NO: 575) | |
| | tracrRNA | — | GCAACUGGAAGGUGCUGUGCGA |
| | Portion 2 | | GUCACGGCACCUUUGCUUUUUU |
| | | | (SEQ ID NO: 596) |
| | tracrRNA | — | GCAACUGGAAGGUGCUGUGCGA |
| | Portion 2- | | GUCACGGCACCUUUGC (SEQ ID |
| | partial | | NO: 597) |
| | tracrRNA | — | GCAACUGGAAGGUGCUGUGCGA |
| | Portion 2- | | GUCACGGCACCUUUGC (SEQ ID |
| | without | | NO: 598) |
| | polyT | | |
| | | OMNI-287 | OMNI-288 |
| | sgRNA V1 | GUUAUACUUUGCUACUUAA | GCUAUGUUUUGAAGGGAAUgaaa |
| | sequence | gaaaUUAAGUAGCUUAGUAU | AUUUCUCUCUUAACAUAGUAAG |
| | | AAUAAGUGAAAAACGCGAA | GAGUUAUGCUCCGUGCGUGUAG |
| | | GUUUGCCCUAUACGUUAUU | CCGAUUAGGUGAAACGAAGCGC |
| | | GUAUGGGGUAUCUUCUUUU | CUCCCAGUGGGGCGCAUAAAUU |
| | | UUU (SEQ ID NO: 599) | UUUU (SEQ ID NO: 613) |
| crRNA: tracr | crRNA | GUUAUACUUUGCUACUUAA | GCUAUGUUUUGAAGGGAAU |
| RNA duplex | (Repeat) | (SEQ ID NO: 600) | (SEQ ID NO: 614) |
| V1 sequences | Partial | GUUAUACUUUGCUAC (SEQ | GCUAUGUUUUGAAGG (SEQ ID |
| | crRNA 1 | ID NO: 601) | NO: 615) |
| | Partial | GUUAUACUUUGC (SEQ ID | GCUAUGUUUUGA (SEQ ID NO: |
| | crRNA 2 | NO: 602) | 616) |
| | Partial | GUUAUACUUU (SEQ ID NO: | GCUAUGUUUU (SEQ ID NO: 617) |
| | crRNA 3 | 603) | |
| | tracrRNA | UUAAGUAGCUUAGUAUAAU | AUUUCUCUCUUAACAUAGU (SEQ |
| | (Antirepeat) | (SEQ ID NO: 604) | ID NO: 618) |
| | Partial | GUAGCUUAGUAUAAU (SEQ | UCUCUUAACAUAGU (SEQ ID NO: |
| | tracrRNA 1 | ID NO: 605) | 619) |
| | Partial | GCUUAGUAUAAU (SEQ ID | CUUAACAUAGU (SEQ ID NO: 620) |
| | tracrRNA 2 | NO: 606) | |
| | Partial | UUAGUAUAAU (SEQ ID NO: | UUAACAUAGU (SEQ ID NO: 621) |
| | tracrRNA 3 | 607) | |
| tracrRNA V1 | tracrRNA | AAGUGAAAAACGC (SEQ ID | AAGGAGUUAUGCUCCGUG (SEQ |
| sequences | Portion 1 | NO: 608) | ID NO: 622) |
| | tracrRNA | AAGUGAAAAACGC (SEQ ID | AAGGAGUUAUGCUCC (SEQ ID |
| | Portion 1- | NO: 609) | NO: 623) |
| | partial | | |
| | tracrRNA | GAAGUUUGCCCUAUACGUU | CGUGUAGCCGAUUAGGUGAAAC |
| | Portion 2 | AUUGUAUGGGGUAUCUUCU | GAA (SEQ ID NO: 624) |
| | | UUUUUU (SEQ ID NO: 610) | |
| | tracrRNA | GAAGUUUGCCCUAUACGUU | CGUGUAGCCGAUUAGGUGAAAC |
| | Portion 2- | AUUGUAUGGGGUAUCUUC | G (SEQ ID NO: 625) |
| | partial | (SEQ ID NO: 611) | |
| | tracrRNA | GAAGUUUGCCCUAUACGUU | — |
| | Portion 2- | AUUGUAUGGGGUAUCUUC | |
| | without | (SEQ ID NO: 612) | |
| | polyT | | |
| | tracrRNA | — | GCGCCUCCCAGUGGGGCGCAUA |
| | Portion 3 | | AAUUUUUU (SEQ ID NO: 626) |
| | tracrRNA | | GCGCCUCCCAGUGGGGCGC (SEQ |
| | Portion 3- | | ID NO: 627) |
| | partial | | |
| | tracrRNA | — | GCGCCUCCCAGUGGGGCGCAUA |
| | Portion 3- | | AA (SEQ ID NO: 628) |
| | without | | |
| | polyT | | |
| | sgRNA V2 | — | GCUAUGUUCUGAAGGGAAUgaaa |
| | sequence | | AUUUCUCUCUUAACAUAGUAAG |
| | | | GAGUUAUGCUCCGUGCGUGUAG |
| | | | CCGAUUAGGUGAAACGAAGCGC |
| | | | CUCCCAGUGGGGCGCAUAAAUU |
| | | | UUUU (SEQ ID NO: 629) |
| crRNA: tracr | crRNA | — | GCUAUGUUCUGAAGGGAAU |
| RNA duplex | (Repeat) | | (SEQ ID NO: 630) |
| V2 sequences | Partial | — | GCUAUGUUCUGAAGG (SEQ ID |
| | crRNA 1 | | NO: 631) |
| | Partial | — | GCUAUGUUCUGA (SEQ ID NO: |
| | crRNA 2 | | 632) |
| | Partial | — | GCUAUGUUCU (SEQ ID NO: 633) |
| | crRNA 3 | | |
| | | OMNI-290 | OMNI-291 |
| | sgRNA V1 | GUUGUAGUUCCCUUUCAGU | GUUGUAGCUCCCUGACAGUgaaaA |
| | sequence | gaaaACUGCAAGGUUGCUAC | CUGUCAUGGUUGCUACAAUAAG |
| | | AAUAAGGUAGUAUACCGCA | GUAGUAUACCGUAAAGCUCUGA |
| | | AAGCUCUGGCGCUCUGCUU | CGCCCUGCUUGCAGGGCGUCAU |
| | | UUGCAGGGCGCCAUCUUUU | CUUUUUUU (SEQ ID NO: 652) |
| | | UU (SEQ ID NO: 634) | |
| crRNA: tracr | crRNA | GUUGUAGUUCCCUUUCAGU | GUUGUAGCUCCCUGACAGU (SEQ |
| RNA duplex | (Repeat) | (SEQ ID NO: 635) | ID NO: 653) |
| V1 sequences | Partial | GUUGUAGUUCCCUUU (SEQ | GUUGUAGCUCCCUGA (SEQ ID |
| | crRNA 1 | ID NO: 636) | NO: 654) |
| | Partial | GUUGUAGUUCCC (SEQ ID | GUUGUAGCUCCC (SEQ ID NO: |
| | crRNA 2 | NO: 637) | 655) |
| | Partial | GUUGUAGUUC (SEQ ID NO: | GUUGUAGCUC (SEQ ID NO: 656) |
| | crRNA 3 | 638) | |
| | tracrRNA | ACUGCAAGGUUGCUACAAU | ACUGUCAUGGUUGCUACAAU |
| | (Antirepeat) | (SEQ ID NO: 639) | (SEQ ID NO: 657) |
| | Partial | CAAGGUUGCUACAAU (SEQ | UCAUGGUUGCUACAAU (SEQ ID |
| | tracrRNA 1 | ID NO: 640) | NO: 658) |
| | Partial | GGUUGCUACAAU (SEQ ID | UGGUUGCUACAAU (SEQ ID NO: |
| | tracrRNA 2 | NO: 641) | 659) |
| | Partial | UUGCUACAAU (SEQ ID NO: | UUGCUACAAU (SEQ ID NO: 660) |
| | tracrRNA 3 | 642) | |
| tracrRNA V1 | tracrRNA | AAGGUAGUAUACCGC (SEQ | AAGGUAGUAUACCGU (SEQ ID |
| sequences | Portion 1 | ID NO: 643) | NO: 661) |
| | tracrRNA | AAGGUAGUAUACC (SEQ ID | AAGGUAGUAUACC (SEQ ID NO: |
| | Portion 1- | NO: 644) | 662) |
| | partial | | |
| | tracrRNA | AAAGCUCUGGCGCUCUGCU | AAAGCUCUGACGCCCUGCUUGC |
| | Portion 2 | UUUGCAGGGCGCCAUCUUU | AGGGCGUCAUCUUUUUUU (SEQ |
| | | UUU (SEQ ID NO: 645) | ID NO: 663) |
| | tracrRNA | AAAGCUCUGGCGCUCUGCU | AAAGCUCUGACGCCCUGCUUGC |
| | Portion 2- | UUUGCAGGGCGCCAUCUUU | AGGGCGUCAUCUUU (SEQ ID NO: |
| | partial | (SEQ ID NO: 646) | 664) |
| | tracrRNA | AAAGCUCUGGCGCUCUGCU | AAAGCUCUGACGCCCUGCUUGC |
| | Portion 2- | UUUGCAGGGCGCCAUC (SEQ | AGGGCGUCAUC (SEQ ID NO: 665) |
| | without | ID NO: 647) | |
| | polyT | | |
| | sgRNA V2 | GUUGUAGUUCCCUUUCAGU | — |
| | sequence | gaaaACUGCAAGGUUGCUAC | |
| | | AAUAAGGUAGUAUACCGCA | |
| | | AAGCUCUGGCGCUCUGCUU | |
| | | CUGCAGGGCGCCAUCUUUU | |
| | | UU (SEQ ID NO: 648) | |
| tracrRNA V2 | tracrRNA | AAAGCUCUGGCGCUCUGCU | — |
| sequences | Portion 2 | UCUGCAGGGCGCCAUCUUU | |
| | | UUU (SEQ ID NO: 649) | |
| | tracrRNA | AAAGCUCUGGCGCUCUGCU | |
| | Portion 2- | UCUGCAGGGCGCCAUCUUU | |
| | partial | (SEQ ID NO: 650) | |
| | tracrRNA | AAAGCUCUGGCGCUCUGCU | — |
| | Portion 2- | UCUGCAGGGCGCCAUC (SEQ | |
| | without | ID NO: 651) | |
| | polyT | | |
| | | OMNI-293 | OMNI-294 |
| | sgRNA V1 | AUUGUAGUUCCCUAAUUUU | GUUGUAGUUCCCUGACAGUgaaa |
| | sequence | gaaaACAAAUUAGGUUGCUA | ACUGUUAUGGUUACUACAAUAA |
| | | CAAAAAGGUAGAAAACCGA | GGUAGUACACCGUAGAGCUCUG |
| | | AAAGCUCUGACGGCUCCUU | ACGCCCUGCUCGCAGGGCGUCA |
| | | UUUGGAGCCGUUAUCUUUU | UCUUUUUUU (SEQ ID NO: 684) |
| | | UU (SEQ ID NO: 666) | |
| crRNA: tracr | crRNA | AUUGUAGUUCCCUAAUUUU | GUUGUAGUUCCCUGACAGU (SEQ |
| RNA duplex | (Repeat) | (SEQ ID NO: 667) | ID NO: 685) |
| V1 sequences | Partial | AUUGUAGUUCCCUAA (SEQ | GUUGUAGUUCCCUGA (SEQ ID |
| | crRNA 1 | ID NO: 668) | NO: 686) |
| | Partial | AUUGUAGUUCCC (SEQ ID | GUUGUAGUUCCC (SEQ ID NO: |
| | crRNA 2 | NO: 669) | 687) |
| | Partial | AUUGUAGUUC (SEQ ID NO: | GUUGUAGUUC (SEQ ID NO: 688) |
| | crRNA 3 | 670) | |
| | tracrRNA | ACAAAUUAGGUUGCUACAA | ACUGUUAUGGUUACUACAAU |
| | (Antirepeat) | (SEQ ID NO: 671) | (SEQ ID NO: 689) |
| | Partial | UUAGGUUGCUACAA (SEQ | UUAUGGUUACUACAAU (SEQ ID |
| | tracrRNA 1 | ID NO: 672) | NO: 690) |
| | Partial | GGUUGCUACAA (SEQ ID NO: | UGGUUACUACAAU (SEQ ID NO: |
| | tracrRNA 2 | 673) | 691) |
| | Partial | UUGCUACAA | UUACUACAAU (SEQ ID NO: 692) |
| | tracrRNA 3 | | |
| tracrRNA V1 | tracrRNA | AAAGGUAGAAAACC (SEQ | AAGGUAGUACACCGUAGAGCUC |
| sequences | Portion 1 | ID NO: 674) | (SEQ ID NO: 693) |
| | tracrRNA | AAAGGUAGAAAACC (SEQ | AAGGUAGUACACCGUAGAGCU |
| | Portion 1- | ID NO: 675) | (SEQ ID NO: 694) |
| | partial | | |
| | tracrRNA | GAAAAGCUCUGACGGCUCC | UGACGCCCUGCUCGCAGGGCGU |
| | Portion 2 | UUUUUGGAGCCGUUAUCUU | CAUCUUUUUUU (SEQ ID NO: 695) |
| | | UUUU (SEQ ID NO: 676) | |
| | tracrRNA | GAAAAGCUCUGACGGCUCC | UGACGCCCUGCUCGCAGGGCGU |
| | Portion 2- | UUUUUGGAGCCGUUAUCUU | CA (SEQ ID NO: 696) |
| | partial | UUU (SEQ ID NO: 677) | |
| | tracrRNA | GAAAAGCUCUGACGGCUCC | UGACGCCCUGCUCGCAGGGCGU |
| | Portion 2- | UUUUUGGAGCCGUUAUC | CAUC (SEQ ID NO: 697) |
| | without | (SEQ ID NO: 678) | |
| | polyT | | |
| | sgRNA V2 | AUUGUAGUUCCCUAAUUUC | — |
| | sequence | gaaaACAAAUUAGGUUGCUA | |
| | | CAAAAAGGUAGAAAACCGA | |
| | | AAAGCUCUGACGGCUCCUU | |
| | | CUUGGAGCCGUUAUCUUUU | |
| | | UU (SEQ ID NO: 679) | |
| crRNA: tracr | crRNA | AUUGUAGUUCCCUAAUUUC | |
| RNA duplex | (Repeat) | (SEQ ID NO: 680) | |
| V2 sequences | | | |
| tracrRNA V2 | tracrRNA | GAAAAGCUCUGACGGCUCC | — |
| sequences | Portion 2 | UUCUUGGAGCCGUUAUCUU | |
| | | UUUU (SEQ ID NO: 681) | |
| | tracrRNA | GAAAAGCUCUGACGGCUCC | — |
| | Portion 2- | UUCUUGGAGCCGUUAUCUU | |
| | partial | UUU (SEQ ID NO: 682) | |
| | tracrRNA | GAAAAGCUCUGACGGCUCC | — |
| | Portion 2- | UUCUUGGAGCCGUUAUC | |
| | without | (SEQ ID NO: 683) | |
| | polyT | | |
| | sgRNA V3 | — | GUUGUAGUUCCCUGACAGUgaaa |
| | sequence | | ACUGUUAUGGUUACUACAAUAA |
| | | | GGUAGUACACCGUAGAGCUCUG |
| | | | ACGCCCUGCUCGCAGGGCGUCA |
| | | | UCUUUUUUUACAGUAAUUUUUU |
| | | | (SEQ ID NO: 698) |
| tracrRNA V3 | tracrRNA | — | AAGGUAGUACACC (SEQ ID NO: |
| sequences | Portion 1 | | 699) |
| | tracrRNA | — | AAGGUAGUACACC (SEQ ID NO: |
| | Portion 1- | | 700) |
| | partial | | |
| | tracrRNA | — | GUAGAGCUCUGACGCCCUGCUC |
| | Portion 2 | | GCAGGGCGUCAUCUUUUUUUAC |
| | | | AGUAAUUUUUU (SEQ ID NO: 701) |
| | tracrRNA | — | GUAGAGCUCUGACGCCCUGCUC |
| | Portion 2- | | GCAGGGCGUCAUCUUUUUUUAC |
| | partial | | (SEQ ID NO: 702) |
| | tracrRNA | — | GUAGAGCUCUGACGCCCUGCUC |
| | Portion 2- | | GCAGGGCGUCAUCUUUUUUUAC |
| | without | | AGUAA (SEQ ID NO: 703) |
| | polyT | | |
| | sgRNA V4 | — | GUUGUAGUUCCCUGACAGUgaaa |
| | sequence | | ACUGUUAUGGUUACUACAAUAA |
| | | | GGUAGUACACCGUAGAGCUCUG |
| | | | ACGCCCUGCUCGCAGGGCGUCA |
| | | | UCUUUCUUUACAGUAAUUUUUU |
| | | | (SEQ ID NO: 704) |
| | tracrRNA | — | GUAGAGCUCUGACGCCCUGCUC |
| | Portion 2 | | GCAGGGCGUCAUCUUUCUUUAC |
| | | | AGUAAUUUUUU (SEQ ID NO: 705) |
| | tracrRNA | — | GUAGAGCUCUGACGCCCUGCUC |
| | Portion 2- | | GCAGGGCGUCAUCUUUCUUUAC |
| | partial | | (SEQ ID NO: 706) |
| | tracrRNA | — | GUAGAGCUCUGACGCCCUGCUC |
| | Portion 2- | | GCAGGGCGUCAUCUUUCUUUAC |
| | without | | AGUAA (SEQ ID NO: 707) |
| | polyT | | |
| | | OMNI-295 | OMNI-296 |
| | sgRNA V1 | GUUUUAGUCCCUUGUUgaaa | GUUAUAGUUCCCGAUUAUUgaaa |
| | sequence | AACAAGGGACUAAAAUAAG | AGUAAUUGGUUUCUAUAAUAAU |
| | | GGGAGUGGGCAUCCCGCAG | CAUUGUUAUUGAUUGUAAGAAU |
| | | GGUGAUGCUUGUGUCAAGG | CAAUGAAGAGUAAAGUAUUCCC |
| | | GGGCAAGCUAGUCAAUCCC | CUUGUUCUUGGAGCAAGGGGUA |
| | | UAAGCCCACCCGCAUUUUU | UCUUUUUU (SEQ ID NO: 729) |
| | | U (SEQ ID NO: 708) | |
| | crRNA | GUUUUAGUCCCUUGUU | GUUAUAGUUCCCGAUUAUU |
| | (Repeat) | (SEQ ID NO: 709) | (SEQ ID NO: 730) |
| crRNA: tracr | Partial | GUUUUAGUC | GUUAUAGU |
| RNA duplex | crRNA 1 | CCUUGU (SEQ | UCCCGAU (SEQ ID |
| V1 sequences | | ID NO: 710) | NO: 731) |
| | Partial | GUUUUAGUCCCU (SEQ ID | GUUAUAGUUCCC (SEQ ID NO: |
| | crRNA 2 | NO: 711) | 732) |
| | Partial | GUUUUAGUCC (SEQ ID NO: | GUUAUAGUUC (SEQ ID NO: 733) |
| | crRNA 3 | 712) | |
| | tracrRNA | AACAAGGGACUAAAAU | AGUAAUUGGUUUCUAUAAU |
| | (Antirepeat) | (SEQ ID NO: 713) | (SEQ ID NO: 734) |
| | Partial | ACAAGGGACUAAAAU (SEQ | AUUGGUUUCUAUAAU (SEQ ID |
| | tracrRNA 1 | ID NO: 714) | NO: 735) |
| | Partial | AGGGACUAAAAU (SEQ ID | GGUUUCUAUAAU (SEQ ID NO: |
| | tracrRNA 2 | NO: 715) | 736) |
| | Partial | GGACUAAAAU (SEQ ID NO: | UUUCUAUAAU (SEQ ID NO: 737) |
| | tracrRNA 3 | 716) | |
| tracrRNA V1 | tracrRNA | AAGGGGAGUGGGCAUCCCG | AAUCAUUGUUAUUGAUUGUAAG |
| sequences | Portion 1 | CAGGGUGAUGCUUGUGUCA | AAUCAAUGAAGAGU (SEQ ID NO: |
| | | AGGGGGCAAGCUAGUCAAU | 738) |
| | | CCCUAAGCCCACCCGCAUU | |
| | | UUUU (SEQ ID NO: 717) | |
| | tracrRNA | GGGGAGUGGGCAUCCCGCA | AAUCAUUGUUAUUGAUUGUAAG |
| | Portion 1- | GGGUGAUGCUUGUGUCAAG | AAUCAAUGA (SEQ ID NO: 739) |
| | partial | GGGGCAAGCUAGUCAAUCC | |
| | | CUAAGCCCACCCGC (SEQ ID | |
| | | NO: 718) | |
| | tracrRNA | AAGGGGAGUGGGCAUCCCG | — |
| | Portion 1- | CAGGGUGAUGCUUGUGUCA | |
| | without | AGGGGGCAAGCUAGUCAAU | |
| | polyT | CCCUAAGCCCACCCGCA | |
| | | (SEQ ID NO: 719) | |
| | tracrRNA | — | AAAGUAUUCCCCUUGUUCUUGG |
| | Portion 2 | | AGCAAGGGGUAUCUUUUUU |
| | | | (SEQ ID NO: 740) |
| | tracrRNA | — | AAAGUAUUCCCCUUGUUCUUGG |
| | Portion 2- | | AGCAAGGGGUAUCUUU (SEQ ID |
| | partial | | NO: 741) |
| | tracrRNA | — | AAAGUAUUCCCCUUGUUCUUGG |
| | Portion 2- | | AGCAAGGGGUAUC (SEQ ID NO: |
| | without | | 742) |
| | polyT | | |
| | sgRNA V2 | GUUCUAGUCCCUUGUUgaaa | — |
| | sequence | AACAAGGGACUAGAAUAAG | |
| | | GGGAGUGGGCAUCCCGCAG | |
| | | GGUGAUGCUUGUGUCAAGG | |
| | | GGGCAAGCUAGUCAAUCCC | |
| | | UAAGCCCACCCGCAUUUUU | |
| | | U (SEQ ID NO: 720) | |
| crRNA: tracr | crRNA | GUUCUAGUC | — |
| RNA duplex | (Repeat) | CCUUGUU | |
| V2 sequences | | (SEQ ID | |
| | | NO: 721) | |
| | Partial | GUUCUAGUCCCUUGU (SEQ | — |
| | crRNA 1 | ID NO: 722) | |
| | Partial | GUUCUAGUCCCU (SEQ ID | — |
| | crRNA 2 | NO: 723) | |
| | Partial | GUUCUAGUCC (SEQ ID NO: | — |
| | crRNA 3 | 724) | |
| | tracrRNA | AACAAGGGACUAGAAU | — |
| | (Antirepeat) | (SEQ ID NO: 725) | |
| | Partial | ACAAGGGACUAGAAU (SEQ | — |
| | tracrRNA 1 | ID NO: 726) | |
| | Partial | AGGGACUAGAAU (SEQ ID | — |
| | tracrRNA 2 | NO: 727) | |
| | Partial | GGACUAGAAU (SEQ ID NO: | — |
| | tracrRNA 3 | 728) | |
| | | OMNI-297 | OMNI-298 |
| | sgRNA V1 | GUUGUAGUUCCCUGAUGGU | GUUGUAAUUCCCUAAUAUUgaaa |
| | sequence | gaaaACUGCUCAGGUUACUA | GAUAUUAGGUUAUUACAAUAAG |
| | | UGAUAAGGUAGUAAACCGA | GUCCAACAGGAGUGUUGGUACC |
| | | AGAGCUCUAAUGCCCCGUC | GUAAGGCUCUGACGGUACGUCU |
| | | UCGCACGGGGCAUUAUCUC | AUUGGCGUACCGUCAUCCUUUU |
| | | UAACAUUUUUU | UU (SEQ ID NO: 762) |
| | | (SEQ ID NO: 743) | |
| crRNA: tracr | crRNA | GUUGUAGUUC | GUUGUAAUUCCCUAAUAUU |
| RNA duplex | (Repeat) | CCUGAUGGU | (SEQ ID NO: 763) |
| V1 sequences | | (SEQ ID NO: 744) | |
| | Partial | GUUGUAGUUCCCUGA (SEQ | GUUGUAAUUCCCUAA (SEQ ID |
| | crRNA 1 | ID NO: 745) | NO: 764) |
| | Partial | GUUGUAGUUCCC (SEQ ID | GUUGUAAUUCCC (SEQ ID NO: |
| | crRNA 2 | NO: 746) | 765) |
| | Partial | GUUGUAGUUC (SEQ ID NO: | GUUGUAAUUC (SEQ ID NO: 766) |
| | crRNA 3 | 747) | |
| | tracrRNA | ACUGCUCAGGUUACUAUGA | GAUAUUAGGUUAUUACAAU |
| | (Antirepeat) | U (SEQ ID NO: 748) | (SEQ ID NO: 767) |
| | Partial | CUCAGGUUACUAUGAU | UUAGGUUAUUACAAU (SEQ ID |
| | tracrRNA 1 | (SEQ ID NO: 749) | NO: 768) |
| | Partial | GGUUACUAUGAU (SEQ ID | GGUUAUUACAAU (SEQ ID NO: |
| | tracrRNA 2 | NO: 750) | 769) |
| | Partial | UUACUAUGAU (SEQ ID NO: | UUAUUACAAU (SEQ ID NO: 770) |
| | tracrRNA 3 | 751) | |
| tracrRNA V1 | tracrRNA | AAGGUAGUAAACCGA (SEQ | AAGGUCCAACAGGAGUGUUGGU |
| sequences | Portion 1 | ID NO: 752) | ACCGU (SEQ ID NO: 771) |
| | tracrRNA | AAGGUAGUAAACC (SEQ ID | AAGGUCCAACAGGAGUGUUGGU |
| | Portion 1- | NO: 753) | ACC (SEQ ID NO: 772) |
| | partial | | |
| | tracrRNA | AGAGCUCUAAUGCCCCGUC | AAGGCUCUGACGGUACGUCUAU |
| | Portion 2 | UCGCACGGGGCAUUAUCUC | UGGCGUACCGUCAUCCUUUUUU |
| | | UAACAUUUUUU (SEQ ID NO: | (SEQ ID NO: 773) |
| | | 754) | |
| | tracrRNA | AGAGCUCUAAUGCCCCGUC | AAGGCUCUGACGGUACGUCUAU |
| | Portion 2- | UCGCACGGGGCAUUAUCUC | UGGCGUACCGUCAUCCUU (SEQ |
| | partial | U (SEQ ID NO: 755) | ID NO: 774) |
| | tracrRNA | AGAGCUCUAAUGCCCCGUC | AAGGCUCUGACGGUACGUCUAU |
| | Portion 2- | UCGCACGGGGCAUUAUCUC | UGGCGUACCGUCAUCC (SEQ ID |
| | without | UAACA (SEQ ID NO: 756) | NO: 775) |
| | polyT | | |
| | sgRNA V3 | GUUGUAGUUCCCUGAUGGU | — |
| | sequence | gaaaACUGCUCAGGUUACUA | |
| | | UGAUAAGGUAGUAAACCGA | |
| | | AGAGCUCUAAUGCCCCGUC | |
| | | UCGCACGGGGCAUUAUCUC | |
| | | UAACAGCGAAAAGGCAAAU | |
| | | UUUUU (SEQ ID NO: 757) | |
| tracrRNA V3 | tracrRNA | AGAGCUCUAAUGCCCCGUC | — |
| sequences | Portion 2 | UCGCACGGGGCAUUAUCUC | |
| | | UAACA (SEQ ID NO: 758) | |
| | tracrRNA | GCGAAAAGGCAAAUUUUUU | — |
| | Portion 3 | (SEQ ID NO: 759) | |
| | tracrRNA | GCGAAAAGGC (SEQ ID NO: | — |
| | Portion 3- | 760) | |
| | partial | | |
| | tracrRNA | GCGAAAAGGCAAA (SEQ ID | — |
| | Portion 3- | NO: 761) | |
| | without | | |
| | polyT | | |
| | | OMNI-299 | OMNI-300 |
| | sgRNA V1 | GUUGUAGCUCCCUGUUAGU | GUUGUAGCUCCCUGGUAGUgaaa |
| | sequence | gaaaACUAAAUAGGUUGCUA | ACUAUCAGGUUGCUAUGAUAAG |
| | | UGAUAAGGUCAUAGGACCG | GUUACUACUUAUCGUAGUAUAC |
| | | CAAAGCUCUGGCGCUCCGC | CGCAGAGCUCUGACGAUCGGUU |
| | | UUCGGCGGAGCGCCAUCUU | UUACCGAUCGUCAUCUUUGUAU |
| | | UUUU (SEQ ID NO: 776) | CUCCACUUUUUU (SEQ ID NO: |
| | | | 799) |
| crRNA: tracr | crRNA | GUUGUAGCUCCCUGUUAGU | GUUGUAGCUCCCUGGUAGU (SEQ |
| RNA duplex | (Repeat) | (SEQ ID NO: 777) | ID NO: 800) |
| V1 sequences | Partial | GUUGUAGCUCCCUGU (SEQ | GUUGUAGCUCCCUGG (SEQ ID |
| | crRNA 1 | ID NO: 778) | NO: 801) |
| | Partial | GUUGUAGCUCCC (SEQ ID | GUUGUAGCUCCC (SEQ ID NO: |
| | crRNA 2 | NO: 779) | 802) |
| | Partial | GUUGUAGCUC (SEQ ID NO: | GUUGUAGCUC (SEQ ID NO: 803) |
| | crRNA 3 | 780) | |
| | tracrRNA | ACUAAAUAGGUUGCUAUGA | ACUAUCAGGUUGCUAUGAU |
| | (Antirepeat) | U (SEQ ID NO: 781) | (SEQ ID NO: 804) |
| | Partial | AAUAGGUUGCUAUGAU | UCAGGUUGCUAUGAU (SEQ ID |
| | tracrRNA 1 | (SEQ ID NO: 782) | NO: 805) |
| | Partial | GGUUGCUAUGAU (SEQ ID | GGUUGCUAUGAU (SEQ ID NO: |
| | tracrRNA 2 | NO: 783) | 806) |
| | Partial | UUGCUAUGAU (SEQ ID NO: | UUGCUAUGAU (SEQ ID NO: 807) |
| | tracrRNA 3 | 784) | |
| tracrRNA V1 | tracrRNA | AAGGUCAUAGGACCGC | AAGGUUACUACUUAUCGUAGUA |
| sequences | Portion 1 | (SEQ ID NO: 785) | UACC (SEQ ID NO: 808) |
| | tracrRNA | AAGGUCAUAGGACC (SEQ ID | AAGGUUACUACUUAUCGUAGUA |
| | Portion 1- | NO: 786) | UACC (SEQ ID NO: 809) |
| | partial | | |
| | tracrRNA | AAAGCUCUGGCGCUCCGCU | GCAGAGCUCUGACGAUCGGUUU |
| | Portion 2 | UCGGCGGAGCGCCAUCUUU | UACCGAUCGUCAUCUUUGUAUC |
| | | UUU (SEQ ID NO: 787) | UCCACUUUUUU (SEQ ID NO: 810) |
| | tracrRNA | AAAGCUCUGGCGCUCCGCU | GCAGAGCUCUGACGAUCGGUUU |
| | Portion 2- | UCGGCGGAGCGCCAUCUUU | UACCGAUCGUCAUCUUUGU (SEQ |
| | partial | (SEQ ID NO: 788) | ID NO: 811) |
| | tracrRNA | AAAGCUCUGGCGCUCCGCU | GCAGAGCUCUGACGAUCGGUUU |
| | Portion 2- | UCGGCGGAGCGCCAUC (SEQ | UACCGAUCGUCAUCUUUGUAUC |
| | without | ID NO: 789) | UCCAC (SEQ ID NO: 812) |
| | polyT | | |
| | sgRNA V2 | — | GUUGUAGCUCCCUGGUAGUgaaa |
| | sequence | | ACUAUCAGGUUGCUAUGAUAAG |
| | | | GUUACUACUUAUCGUAGUAUAC |
| | | | CGCAGAGCUCUGACGAUCGGUU |
| | | | CUACCGAUCGUCAUCUUUGUAU |
| | | | CUCCACUUUUUU (SEQ ID NO: |
| | | | 813) |
| tracrRNA V2 | tracrRNA | — | GCAGAGCUCUGACGAUCGGUUC |
| sequences | Portion 2 | | UACCGAUCGUCAUCUUUGUAUC |
| | | | UCCACUUUUUU (SEQ ID NO: 814) |
| | tracrRNA | — | GCAGAGCUCUGACGAUCGGUUC |
| | Portion 2- | | UACCGAUCGUCAUCUUUGU (SEQ |
| | partial | | ID NO: 815) |
| | tracrRNA | — | GCAGAGCUCUGACGAUCGGUUC |
| | Portion 2- | | UACCGAUCGUCAUCUUUGUAUC |
| | without | | UCCAC (SEQ ID NO: 816) |
| | polyT | | |
| | sgRNA V3 | GUUGUAGCUCCCUGUUAGU | — |
| | sequence | gaaaACUAAAUAGGUUGCUA | |
| | | UGAUAAGGUCAUAGGACCG | |
| | | CAAAGCUCUGGCGCUCCGC | |
| | | UUCGGCGGAGCGCCAUCUU | |
| | | UUUUGCUCAUUUUUU (SEQ | |
| | | ID NO: 790) | |
| tracrRNA V3 | tracrRNA | AAGGUCAUAGGACC (SEQ ID | — |
| sequences | Portion 1 | NO: 791) | |
| | tracrRNA | GCAAAGCUCUGGCGCUCCG | — |
| | Portion 2 | CUUCGGCGGAGCGCCAUCU | |
| | | UUUUUGCUCAUUUUUU | |
| | | (SEQ ID NO: 792) | |
| | tracrRNA | GCAAAGCUCUGGCGCUCCG | — |
| | Portion 2- | CUUCGGCGGAGCGCCAUCU | |
| | partial | UUUUUGC (SEQ ID NO: 793) | |
| | tracrRNA | GCAAAGCUCUGGCGCUCCG | — |
| | Portion 2- | CUUCGGCGGAGCGCCAUCU | |
| | without | UUUUUGCUCA (SEQ ID NO: | |
| | polyT | 794) | |
| | sgRNA V4 | GUUGUAGCUCCCUGUUAGU | — |
| | sequence | gaaaACUAAAUAGGUUGCUA | |
| | | UGAUAAGGUCAUAGGACCG | |
| | | CAAAGCUCUGGCGCUCCGC | |
| | | UUCGGCGGAGCGCCAUCUU | |
| | | CUUUGCUCAUUUUUU (SEQ | |
| | | ID NO: 795) | |
| tracrRNA V4 | tracrRNA | GCAAAGCUCUGGCGCUCCG | — |
| sequences | Portion 2 | CUUCGGCGGAGCGCCAUCU | |
| | | UCUUUGCUCAUUUUUU | |
| | | (SEQ ID NO: 796) | |
| | tracrRNA | GCAAAGCUCUGGCGCUCCG | — |
| | Portion 2- | CUUCGGCGGAGCGCCAUCU | |
| | partial | UCUUUGC (SEQ ID NO: 797) | |
| | tracrRNA | GCAAAGCUCUGGCGCUCCG | — |
| | Portion 2- | CUUCGGCGGAGCGCCAUCU | |
| | without | UCUUUGCUCA (SEQ ID NO: | |
| | polyT | 798) | |
| | | OMNI-301 | OMNI-302 |
| | sgRNA V1 | GUUGUAGUUCCCUGACGGU | GUUGUAGUUCCCCGGUAGUgaaa |
| | sequence | gaaaACUGUUAGGUUACUAC | ACUAUCGGGUUACUAUGAUAAG |
| | | GAUAAGGUUACUACCUUGU | GUAGUAAACCGAAGAGCUCUGA |
| | | GUAGUAUACCGCAAAGCUC | CGCCUCGCAUUUCGUGGGGCGU |
| | | UAGCGCCUCGCUUUAUGCG | UAUCUCUUUAUGGGGCGGUUUG |
| | | GGGCGCUAUCUUUAUUUUU | CAUAACGAGAGAAUUGGUUCAG |
| | | U (SEQ ID NO: 817) | GAGGGAUCAAGAUUUUUU (SEQ |
| | | | ID NO: 831) |
| crRNA: tracr | crRNA | GUUGUAGUUCCCUGACGGU | GUUGUAGUUCCCCGGUAGU (SEQ |
| RNA duplex | (Repeat) | (SEQ ID NO: 818) | ID NO: 832) |
| V1 sequences | Partial | GUUGUAGUUCCCUGA (SEQ | GUUGUAGUUCCCCGG (SEQ ID |
| | crRNA 1 | ID NO: 819) | NO: 833) |
| | Partial | GUUGUAGUUCCC (SEQ ID | GUUGUAGUUCCC (SEQ ID NO: |
| | crRNA 2 | NO: 820) | 834) |
| | Partial | GUUGUAGUUC (SEQ ID NO: | GUUGUAGUUC (SEQ ID NO: 835) |
| | crRNA 3 | 821) | |
| | tracrRNA | ACUGUUAGGUUACUACGAU | ACUAUCGGGUUACUAUGAU |
| | (Antirepeat) | (SEQ ID NO: 822) | (SEQ ID NO: 836) |
| | Partial | UUAGGUUACUACGAU (SEQ | UCGGGUUACUAUGAU (SEQ ID |
| | tracrRNA 1 | ID NO: 823) | NO: 837) |
| | Partial | GGUUACUACGAU (SEQ ID | GGUUACUAUGAU (SEQ ID NO: |
| | tracrRNA 2 | NO: 824) | 838) |
| | Partial | UUACUACGAU (SEQ ID NO: | UUACUAUGAU (SEQ ID NO: 839) |
| | tracrRNA 3 | 825) | |
| tracrRNA V1 | tracrRNA | AAGGUUACUACCUUGUGUA | AAGGUAGUAAACCGAAGAGCUC |
| sequences | Portion 1 | GUAUACCGC (SEQ ID NO: | UGACGCCUCGCAUUUCGUGGGG |
| | | 826) | CGUUAUCUCUUUAUGGGGCGGU |
| | | | UUGCAUAAC (SEQ ID NO: 840) |
| | tracrRNA | AAGGUUACUACCUUGUGUA | AAGGUAGUAAACCGAAGAGCUC |
| | Portion 1- | GUAUACC (SEQ ID NO: 827) | UGACGCCUCGCAUUUCGUGGGG |
| | partial | | CGUUAUCUCUUUAUGGGGCGGU |
| | | | UUGC (SEQ ID NO: 841) |
| | tracrRNA | AAAGCUCUAGCGCCUCGCU | GAGAGAAUUGGUUCAGGAGGGA |
| | Portion 2 | UUAUGCGGGGCGCUAUCUU | UCAAGAUUUUUU (SEQ ID NO: |
| | | UAUUUUUU (SEQ ID NO: 828) | 842) |
| | tracrRNA | AAAGCUCUAGCGCCUCGCU | GAGAGAAUUGGUUCAGGAGGGA |
| | Portion 2- | UUAUGCGGGGCGCUAUCUU | UCAAGAUUUUUU (SEQ ID NO: |
| | partial | U (SEQ ID NO: 829) | 843) |
| | tracrRNA | AAAGCUCUAGCGCCUCGCU | GAGAGAAUUGGUUCAGGAGGGA |
| | Portion 2- | UUAUGCGGGGCGCUAUCUU | UCAAGA (SEQ ID NO: 844) |
| | without | UA (SEQ ID NO: 830) | |
| | polyT | | |
| | | OMNI-303 | OMNI-304 |
| | sgRNA V1 | GUUGUAGCUCCCUAACAGU | GUUUUAGCUCUCUGAUGAgaaaU |
| | sequence | gaaaACUAUUAGGUUGCUAU | CAUCAGAGUUCUAAGACAAGGC |
| | | GAUAAGGUUACUGCUUUAU | AGAAUGCCGUAGGGUAGUGGAA |
| | | UGUAGUAUACCGCAAAGCU | ACCCAAAACACCACACUGAGCA |
| | | CUGACGAUCGAUUUUAUCG | AUCUAACGAUUGCUCUUUUUU |
| | | GUCGUCAUCUUCAUAUUUU | (SEQ ID NO: 863) |
| | | UU (SEQ ID NO: 845) | |
| crRNA: tracr | crRNA | GUUGUAGCUCCCUAACAGU | GUUUUAGCUCUCUGAUGA (SEQ |
| RNA duplex | (Repeat) | (SEQ ID NO: 846) | ID NO: 864) |
| V1 sequences | Partial | GUUGUAGCUCCCUAA (SEQ | GUUUUAGCUCUCUGA (SEQ ID |
| | crRNA 1 | ID NO: 847) | NO: 865) |
| | Partial | GUUGUAGCUCCC (SEQ ID | GUUUUAGCUCUC (SEQ ID NO: |
| | crRNA 2 | NO: 848) | 866) |
| | Partial | GUUGUAGCUC (SEQ ID NO: | GUUUUAGCUC (SEQ ID NO: 867) |
| | crRNA 3 | 849) | |
| | tracrRNA | ACUAUUAGGUUGCUAUGAU | UCAUCAGAGUUCUAAGAC (SEQ |
| | (Antirepeat) | (SEQ ID NO: 850) | ID NO: 868) |
| | Partial | ACUAUUAGGUUGCUAUGAU | UCAGAGUUCUAAGAC (SEQ ID |
| | tracrRNA 1 | (SEQ ID NO: 851) | NO: 869) |
| | Partial | GGUUGCUAUGAU (SEQ ID | GAGUUCUAAGAC (SEQ ID NO: |
| | tracrRNA 2 | NO: 852) | 870) |
| | Partial | UUGCUAUGAU (SEQ ID NO: | GUUCUAAGAC (SEQ ID NO: 871) |
| | tracrRNA 3 | 853) | |
| tracrRNA V1 | tracrRNA | AAGGUUACUGCUUUAUUGU | AAGGCAGAAUGCC (SEQ ID NO: |
| sequences | Portion 1 | AGUAUACCGCAAAGCUC | 872) |
| | | (SEQ ID NO: 854) | |
| | tracrRNA | AAGGUUACUGCUUUAUUGU | AAGGCAGAAUGCC (SEQ ID NO: |
| | Portion 1- | AGUAUACC (SEQ ID NO: 855) | 873) |
| | partial | | |
| | tracrRNA | UGACGAUCGAUUUUAUCGG | GUAGGGUAGUGGAAACCCAAAA |
| | Portion 2 | UCGUCAUCUUCAUAUUUUU | CACCACACU (SEQ ID NO: 874) |
| | | U (SEQ ID NO: 856) | |
| | tracrRNA | UGACGAUCGAUUUUAUCGG | GUAGGGUAGUGGAAACCCAAAA |
| | Portion 2- | UCGUCA (SEQ ID NO: 857) | CACCAC (SEQ ID NO: 875) |
| | partial | | |
| | tracrRNA | UGACGAUCGAUUUUAUCGG | — |
| | Portion 2- | UCGUCAUCUUCAUA (SEQ ID | |
| | without | NO: 858) | |
| | polyT | | |
| | tracrRNA | — | GAGCAAUCUAACGAUUGCUCUU |
| | Portion 3 | | UUUU (SEQ ID NO: 876) |
| | tracrRNA | — | GAGCAAUCUAACGAUUGCUC |
| | Portion 3- | | (SEQ ID NO: 877) |
| | partial | | |
| | tracrRNA | — | GAGCAAUCUAACGAUUGCUC |
| | Portion 3- | | (SEQ ID NO: 878) |
| | without | | |
| | polyT | | |
| | sgRNA V2 | GUUGUAGCUCCCUAACAGU | GUCUUAGCUCUCUGAUGAgaaaUC |
| | sequence | gaaaACUAUUAGGUUGCUAU | AUCAGAGUUCUAAGACAAGGCA |
| | | GAUAAGGUUACUGCUUUAU | GAAUGCCGUAGGGUAGUGGAAA |
| | | UGUAGUAUACCGCAAAGCU | CCCAAAACACCACACUGAGCAA |
| | | CUGACGAUCGAUUCUAUCG | UCUAACGAUUGCUCUUUUUU |
| | | GUCGUCAUCUUCAUAUUUU | (SEQ ID NO: 879) |
| | | UU (SEQ ID NO: 859) | |
| crRNA: tracr | crRNA | — | GUCUUAGCUCUCUGAUGA (SEQ |
| RNA duplex | (Repeat) | | ID NO: 880) |
| V2 sequences | Partial | — | GUCUUAGCUCUCUGA (SEQ ID |
| | crRNA 1 | | NO: 881) |
| | Partial | — | GUCUUAGCUCUC (SEQ ID NO: |
| | crRNA 2 | | 882) |
| | Partial | — | GUCUUAGCUC (SEQ ID NO: 883) |
| | crRNA 3 | | |
| tracrRNA V2 | tracrRNA | UGACGAUCGAUUCUAUCGG | — |
| sequences | Portion 2 | UCGUCAUCUUCAUAUUUUU | |
| | | U (SEQ ID NO: 860) | |
| | tracrRNA | UGACGAUCGAUUCUAUCGG | — |
| | Portion 2- | UCGUCA (SEQ ID NO: 861) | |
| | partial | | |
| | tracrRNA | UGACGAUCGAUUCUAUCGG | — |
| | Portion 2- | UCGUCAUCUUCAUA (SEQ ID | |
| | without | NO: 862) | |
| | polyT | | |
| | | OMNI-305 | OMNI-307 |
| | sgRNA V1 | AUUGUAGUUCCCUAAUUUU | GUUUGAGAGUCUUGUU AgaaaUA |
| | sequence | gaaaACAAUUAGGUUACUAC | AACAAGACGAGUUCAAAUAAAA |
| | | AACAAGGUAGAAAACCGAA | AUUUAUUCUAACCACUUGUUCG |
| | | AAGCUCUGACGGUUCACUU | CAUUGGCGACGCGCUCUCUUCG |
| | | UUUUGGUGGGCCGUCAUCU | GAGAGCUUUUUU (SEQ ID NO: |
| | | UUUUU (SEQ ID NO: 884) | 902) |
| crRNA: tracr | crRNA | AUUGUAGUUCCCUAAUUUU | GUUUGAGAGUCUUGUUA (SEQ ID |
| RNA duplex | (Repeat) | (SEQ ID NO: 885) | NO: 903) |
| V1 sequences | Partial | AUUGUAGUUCCCUAA (SEQ | GUUUGAGAGUCUUGU (SEQ ID |
| | crRNA 1 | ID NO: 886) | NO: 904) |
| | Partial | AUUGUAGUUCCC (SEQ ID | GUUUGAGAGUCU (SEQ ID NO: |
| | crRNA 2 | NO: 887) | 905) |
| | Partial | AUUGUAGUUC (SEQ ID NO: | GUUUGAGAGU (SEQ ID NO: 906) |
| | crRNA 3 | 888) | |
| | tracrRNA | ACAAUUAGGUUACUACAA | UAAACAAGACGAGUUCAAAU |
| | (Antirepeat) | (SEQ ID NO: 889) | (SEQ ID NO: 907) |
| | Partial | UUAGGUUACUACAA (SEQ | ACAAGACGAGUUCAAAU (SEQ ID |
| | tracrRNA 1 | ID NO: 890) | NO: 908) |
| | Partial | GGUUACUACAA (SEQ ID NO: | AGACGAGUUCAAAU (SEQ ID NO: |
| | tracrRNA 2 | 891) | 909) |
| | Partial | UUACUACAA | ACGAGUUCAAAU (SEQ ID NO: |
| | tracrRNA 3 | | 910) |
| tracrRNA V1 | tracrRNA | CAAGGUAGAAAACC (SEQ ID | AAAAAUUUAUUCUAACCACUUG |
| sequences | Portion 1 | NO: 892) | UUCGCAUUGGCGACGC (SEQ ID |
| | | | NO: 911) |
| | tracrRNA | CAAGGUAGAAAACC (SEQ ID | AAAAAUUUAUUCUAACCACUUG |
| | Portion 1- | NO: 893) | UUCGCAUUGGCGACGC (SEQ ID |
| | partial | | NO: 912) |
| | tracrRNA | GAAAAGCUCUGACGGUUCA | GCUCUCUUCGGAGAGCUUUUUU |
| | Portion 2 | CUUUUUUGGUGGGCCGUCA | (SEQ ID NO: 913) |
| | | UCUUUUUU (SEQ ID NO: 894) | |
| | tracrRNA | GAAAAGCUCUGACGGUUCA | GCUCUCUUCGGAGAGC (SEQ ID |
| | Portion 2- | CUUUUUUGGUGGGCCGUCA | NO: 914) |
| | partial | UCUUUUU (SEQ ID NO: 895) | |
| | tracrRNA | GAAAAGCUCUGACGGUUCA | GCUCUCUUCGGAGAGC (SEQ ID |
| | Portion 2- | CUUUUUUGGUGGGCCGUCA | NO: 915) |
| | without | UC (SEQ ID NO: 896) | |
| | polyT | | |
| | sgRNA V2 | AUUGUAGUUCCCUAAUUUC | — |
| | sequence | gaaaACAAUUAGGUUACUAC | |
| | | AACAAGGUAGAAAACCGAA | |
| | | AAGCUCUGACGGUUCACUU | |
| | | UCUUGGUGGGCCGUCAUCU | |
| | | UUUUU (SEQ ID NO: 897) | |
| crRNA: tracr | crRNA | AUUGUAGUUCCCUAAUUUC | — |
| RNA duplex | (Repeat) | (SEQ ID NO: 898) | |
| V2 sequences | | | |
| tracrRNA V2 | tracrRNA | GAAAAGCUCUGACGGUUCA | — |
| sequences | Portion 2 | CUUUCUUGGUGGGCCGUCA | |
| | | UCUUUUUU (SEQ ID NO: 899) | |
| | tracrRNA | GAAAAGCUCUGACGGUUCA | — |
| | Portion 2- | CUUUCUUGGUGGGCCGUCA | |
| | partial | UCUUUUU (SEQ ID NO: 900) | |
| | tracrRNA | GAAAAGCUCUGACGGUUCA | — |
| | Portion 2- | CUUUCUUGGUGGGCCGUCA | |
| | without | UC (SEQ ID NO: 901) | |
| | polyT | | |
| | | OMNI-308 | OMNI-309 |
| | sgRNA V1 | GUUGUAGUUCCCUAAUUUU | GUUGUGGUUCCCUGUUCUUgaaa |
| | sequence | gaaaAUUAUUAGGUUACUAU | GAGAACAUGUGUUACCGCAAUA |
| | | GAUAAGGUAGUACACCGAA | AGGUAAAACACCACAAAGCACU |
| | | AAGCUCUAACGCUCUGUCU | GCCCCAGCCUAACGGCUGGGGC |
| | | UGGACAGAGCGUUAUCUUU | AUCUUUGUAGAUAAAUAUUAGG |
| | | UUU (SEQ ID NO: 916) | CAAAGGAGCUGACAUCAUUUUU |
| | | | U (SEQ ID NO: 932) |
| crRNA: tracr | crRNA | GUUGUAGUUCCCUAAUUUU | GUUGUGGUUCCCUGUUCUU (SEQ |
| RNA duplex | (Repeat) | (SEQ ID NO: 917) | ID NO: 933) |
| V1 sequences | Partial | GUUGUAGUUCCCUAA (SEQ | GUUGUGGUUCCCUGU (SEQ ID |
| | crRNA 1 | ID NO: 918) | NO: 934) |
| | Partial | GUUGUAGUUCCC (SEQ ID | GUUGUGGUUCCC (SEQ ID NO: |
| | crRNA 2 | NO: 919) | 935) |
| | Partial | GUUGUAGUUC (SEQ ID NO: | GUUGUGGUUC (SEQ ID NO: 936) |
| | crRNA 3 | 920) | |
| | tracrRNA | AUUAUUAGGUUACUAUGAU | GAGAACAUGUGUUACCGCAAU |
| | (Antirepeat) | (SEQ ID NO: 921) | (SEQ ID NO: 937) |
| | Partial | UUAGGUUACUAUGAU (SEQ | ACAUGUGUUACCGCAAU (SEQ ID |
| | tracrRNA 1 | ID NO: 922) | NO: 938) |
| | Partial | GGUUACUAUGAU (SEQ ID | UGUGUUACCGCAAU (SEQ ID NO: |
| | tracrRNA 2 | NO: 923) | 939) |
| | Partial | UUACUAUGAU (SEQ ID NO: | UUACCGCAAU (SEQ ID NO: 940) |
| | tracrRNA 3 | 924) | |
| tracrRNA V1 | tracrRNA | AAGGUAGUACACC (SEQ ID | AAGGUAAAACACC (SEQ ID NO: |
| sequences | Portion 1 | NO: 925) | 941) |
| | tracrRNA | AAGGUAGUACACC (SEQ ID | AAGGUAAAACACC (SEQ ID NO: |
| | Portion 1- | NO: 926) | 942) |
| | partial | | |
| | tracrRNA | GAAAAGCUCUAACGCUCUG | ACAAAGCACUGCCCCAGCCUAA |
| | Portion 2 | UCUUGGACAGAGCGUUAUC | CGGCUGGGGCAUCUUUGUAGAU |
| | | UUUUUU (SEQ ID NO: 927) | AAAUAUUA (SEQ ID NO: 943) |
| | tracrRNA | GAAAAGCUCUAACGCUCUG | ACAAAGCACUGCCCCAGCCUAA |
| | Portion 2- | UCUUGGACAGAGCGUUAUC | CGGCUGGGGCAUCUUUGU (SEQ |
| | partial | UUUUU (SEQ ID NO: 928) | ID NO: 944) |
| | tracrRNA | GAAAAGCUCUAACGCUCUG | |
| | Portion 2- | UCUUGGACAGAGCGUUAUC | |
| | without | (SEQ ID NO: 929) | |
| | polyT | | |
| | tracrRNA | | GGCAAAGGAGCUGACAUCAUUU |
| | Portion 3 | | UUU (SEQ ID NO: 945) |
| | tracrRNA | — | GGCAAAGGAGCU (SEQ ID NO: |
| | Portion 3- | | 946) |
| | partial | | |
| | tracrRNA | — | GGCAAAGGAGCUGACAUCA (SEQ |
| | Portion 3- | | ID NO: 947) |
| | without | | |
| | polyT | | |
| | sgRNA V2 | GUUGUAGUUCCCUAAUUCU | — |
| | sequence | gaaaAUUAUUAGGUUACUAU | |
| | | GAUAAGGUAGUACACCGAA | |
| | | AAGCUCUAACGCUCUGUCU | |
| | | UGGACAGAGCGUUAUCUUU | |
| | | UUU (SEQ ID NO: 930) | |
| crRNA: tracr | crRNA | GUUGUAGUUCCCUAAUUCU | — |
| RNA duplex | (Repeat) | (SEQ ID NO: 931) | |
| V2 sequences | | | |
| | | OMNI-310 | OMNI-311 |
| | sgRNA V1 | AUUUUAGUACCCGGAGAAA | GUUUUAGUACCUGGAAAAAgaaa |
| | sequence | gaaaUUUCUUCGGACCUAUU | UUUUUUCAGAUCUACUAAAAUA |
| | | AAAACAAGGCUUUAUGCCG | AGGCUUUAUGCCGAAACUAAAG |
| | | AAAGUUUACUUUGAAGAAA | GACACCGACGGGUGUCCUUUUU |
| | | UUAACAAAAAAGGCACCGA | U (SEQ ID NO: 963) |
| | | CGGGUGCCUUUUUU (SEQ ID | |
| | | NO: 948) | |
| crRNA: tracr | crRNA | AUUUUAGUACCCGGAGAAA | GUUUUAGUACCUGGAAAAA |
| RNA duplex | (Repeat) | (SEQ ID NO: 949) | (SEQ ID NO: 964) |
| V1 sequences | Partial | AUUUUAGUACCCGGA (SEQ | GUUUUAGUACCUGGA (SEQ ID |
| | crRNA 1 | ID NO: 950) | NO: 965) |
| | Partial | AUUUUAGUACCC (SEQ ID | GUUUUAGUACCU (SEQ ID NO: |
| | crRNA 2 | NO: 951) | 966) |
| | Partial | AUUUUAGUAC (SEQ ID NO: | GUUUUAGUAC (SEQ ID NO: 967) |
| | crRNA 3 | 952) | |
| | tracrRNA | UUUCUUCGGACCUAUUAAA | UUUUUUCAGAUCUACUAAAAU |
| | (Antirepeat) | A (SEQ ID NO: 953) | (SEQ ID NO: 968) |
| | Partial | UUCGGACCUAUUAAAA | UUCAGAUCUACUAAAAU (SEQ ID |
| | tracrRNA 1 | (SEQ ID NO: 954) | NO: 969) |
| | Partial | GGACCUAUUAAAA (SEQ ID | AGAUCUACUAAAAU (SEQ ID NO: |
| | tracrRNA 2 | NO: 955) | 970) |
| | Partial | ACCUAUUAAAA (SEQ ID NO: | AUCUACUAAAAU (SEQ ID NO: |
| | tracrRNA 3 | 956) | 971) |
| tracrRNA V1 | tracrRNA | CAAGGCUUUAUGCCG (SEQ | AAGGCUUUAUGCCGAAACU (SEQ |
| sequences | Portion 1 | ID NO: 957) | ID NO: 972) |
| | tracrRNA | CAAGGCUUUAUGCC (SEQ ID | AAGGCUUUAUGCC (SEQ ID NO: |
| | Portion 1- | NO: 958) | 973) |
| | partial | | |
| | tracrRNA | AAAGUUUACUUUGAAGAAA | AAAGGACACCGACGGGUGUCCU |
| | Portion 2 | UUAAC (SEQ ID NO: 959) | UUUUU (SEQ ID NO: 974) |
| | tracrRNA | AAAGUUUACUUU (SEQ ID | AAAGGACACCGACGGGUGUCCU |
| | Portion 2- | NO: 960) | UU (SEQ ID NO: 975) |
| | partial | | |
| | tracrRNA | — | AAAGGACACCGACGGGUGUCC |
| | Portion 2- | | (SEQ ID NO: 976) |
| | without | | |
| | polyT | | |
| | tracrRNA | AAAAAAGGCACCGACGGGU | — |
| | Portion 3 | GCCUUUUUU (SEQ ID NO: | |
| | | 961) | |
| | tracrRNA | AAAAAAGGCACCGACGGGU | — |
| | Portion 3- | GCC (SEQ ID NO: 962) | |
| | without | | |
| | polyT | | |
| | sgRNA V2 | — | GUUCUAGUACCUGGAAGAAgaaa |
| | sequence | | UUCUUUCAGAUCUACUAGAAUA |
| | | | AGGCUUUAUGCCGAAACUAAAG |
| | | | GACACCGACGGGUGUCCUUUUU |
| | | | U (SEQ ID NO: 977) |
| crRNA: tracr | crRNA | — | GUUCUAGUACCUGGAAGAA |
| RNA duplex | (Repeat) | | (SEQ ID NO: 978) |
| V2 sequences | Partial | — | GUUCUAGUACCUGGA (SEQ ID |
| | crRNA 1 | | NO: 979) |
| | Partial | — | GUUCUAGUACCU (SEQ ID NO: |
| | crRNA 2 | | 980) |
| | Partial | — | GUUCUAGUAC (SEQ ID NO: 981) |
| | crRNA 3 | | |
| | tracrRNA | — | UUCUUUCAGAUCUACUAGAAU |
| | (Antirepeat) | | (SEQ ID NO: 982) |
| | Partial | — | UUCAGAUCUACUAGAAU (SEQ ID |
| | tracrRNA 1 | | NO: 983) |
| | Partial | — | AGAUCUACUAGAAU (SEQ ID NO: |
| | tracrRNA 2 | | 984) |
| | Partial | — | AUCUACUAGAAU (SEQ ID NO: |
| | tracrRNA 3 | | 985) |
| | | OMNI-312 | OMNI-313 |
| | sgRNA V1 | GUUUUGCCUUGAAUCCgaaa | GUUUUAGUUCCCUGAUGUUgaaa |
| | sequence | GGAUUCAAGACAAAAUUUG | ACCAUCAGGUUACUAAGAUAAG |
| | | AGAUGCAAACCGAUUUUCC | GUCUUAGUACCGCAAAGCUCUA |
| | | UGACUGCAAGCCAGUCACA | ACACCUUGUUUCGGCAGGGUGU |
| | | CCGGUAACAAGAGCAUUUU | UAUCUUUUUUU (SEQ ID NO: |
| | | UUAAGACUGUCUCACUGUA | 1011) |
| | | GAAGUGAGGCAGUCUUUUU | |
| | | U (SEQ ID NO: 986) | |
| crRNA: tracr | crRNA | GUUUUGCCUUGAAUCC | GUUUUAGUUCCCUGAUGUU |
| RNA duplex | (Repeat) | (SEQ ID NO: 987) | (SEQ ID NO: 1012) |
| V1 sequences | Partial | GUUUUGCCUUGAAUC (SEQ | GUUUUAGUUCCCUGA (SEQ ID |
| | crRNA 1 | ID NO: 988) | NO: 1013) |
| | Partial | GUUUUGCCUUGA (SEQ ID | GUUUUAGUUCCC (SEQ ID NO: |
| | crRNA 2 | NO: 989) | 1014) |
| | Partial | GUUUUGCCUU (SEQ ID NO: | GUUUUAGUUC (SEQ ID NO: 1015) |
| | crRNA 3 | 990) | |
| | tracrRNA | GGAUUCAAGACAAAAU | ACCAUCAGGUUACUAAGAU (SEQ |
| | (Antirepeat) | (SEQ ID NO: 991) | ID NO: 1016) |
| | Partial | GAUUCAAGACAAAAU (SEQ | UCAGGUUACUAAGAU (SEQ ID |
| | tracrRNA 1 | ID NO: 992) | NO: 1017) |
| | Partial | UCAAGACAAAAU (SEQ ID | GGUUACUAAGAU (SEQ ID NO: |
| | tracrRNA 2 | NO: 993) | 1018) |
| | Partial | AAGACAAAAU (SEQ ID NO: | UUACUAAGAU (SEQ ID NO: 1019) |
| | tracrRNA 3 | 994) | |
| tracrRNA V1 | tracrRNA | UUGAGAUGCAAACCGAUUU | AAGGUCUUAGUACCGC (SEQ ID |
| sequences | Portion 1 | UCCUGACUGCAAGCCAGUC | NO: 1020) |
| | | ACACCGGUAACAAGAGCAU | |
| | | UUUUU (SEQ ID NO: 995) | |
| | tracrRNA | UUGAGAUGCAAACCGAUUU | AAGGUCUUAGUACC (SEQ ID NO: |
| | Portion 1- | UCCUGACUGCAAGCCAGUC | 1021) |
| | partial | ACACCGGUAACAAGAGCAU | |
| | | UUU (SEQ ID NO: 996) | |
| | tracrRNA | AAGACUGUCUCACUGUAGA | AAAGCUCUAACACCUUGUUUCG |
| | Portion 2 | AGUGAGGCAGUCUUUUUU | GCAGGGUGUUAUCUUUUUUU |
| | | (SEQ ID NO: 997) | (SEQ ID NO: 1022) |
| | tracrRNA | AAGACUGUCUCACUGUAGA | AAAGCUCUAACACCUUGUUUCG |
| | Portion 2- | AGUGAGGCAGUCUU (SEQ | GCAGGGUGUUAUCUUU (SEQ ID |
| | partial | ID NO: 998) | NO: 1023) |
| | tracrRNA | AAGACUGUCUCACUGUAGA | AAAGCUCUAACACCUUGUUUCG |
| | Portion 2- | AGUGAGGCAGUC (SEQ ID | GCAGGGUGUUAUC (SEQ ID NO: |
| | without | NO: 999) | 1024) |
| | polyT | | |
| | sgRNA V2 | GUUCUGCCUUGAAUCCgaaa | GUCUUAGUUCCCUGAUGUUgaaa |
| | sequence | GGAUUCAAGACAGAAUUUG | ACCAUCAGGUUACUAAGAUAAG |
| | | AGAUGCAAACCGAUUCUCC | GUCUUAGUACCGCAAAGCUCUA |
| | | UGACUGCAAGCCAGUCACA | ACACCUUGUUUCGGCAGGGUGU |
| | | CCGGUAACAAGAGCAUUUC | UAUCUUUUUUU (SEQ ID NO: |
| | | UUAAGACUGUCUCACUGUA | 1025) |
| | | GAAGUGAGGCAGUCUUUUU | |
| | | U (SEQ ID NO: 1000) | |
| crRNA: tracr | crRNA | GUUCUGCCUUGAAUCC (SEQ | GUCUUAGUUCCCUGAUGUU (SEQ |
| RNA duplex | (Repeat) | ID NO: 1001) | ID NO: 1026) |
| V2 sequences | Partial | GUUCUGCCUUGAAUC (SEQ | GUCUUAGUUCCCUGA (SEQ ID |
| | crRNA 1 | ID NO: 1002) | NO: 1027) |
| | Partial | GUUCUGCCUUGA (SEQ ID | GUCUUAGUUCCC (SEQ ID NO: |
| | crRNA 2 | NO: 1003) | 1028) |
| | Partial | GUUCUGCCUU (SEQ ID NO: | GUCUUAGUUC (SEQ ID NO: 1029) |
| | crRNA 3 | 1004) | |
| | tracrRNA | GGAUUCAAGACAGAAU | — |
| | (Antirepeat) | (SEQ ID NO: 1005) | |
| | Partial | GAUUCAAGACAGAAU (SEQ | — |
| | tracrRNA 1 | ID NO: 1006) | |
| | Partial | UCAAGACAGAAU (SEQ ID | — |
| | tracrRNA 2 | NO: 1007) | |
| | Partial | AAGACAGAAU (SEQ ID NO: | — |
| | tracrRNA 3 | 1008) | |
| tracrRNA V2 | tracrRNA | UUGAGAUGCAAACCGAUUC | — |
| sequences | Portion 1 | UCCUGACUGCAAGCCAGUC | |
| | | ACACCGGUAACAAGAGCAU | |
| | | UUCUU (SEQ ID NO: 1009) | |
| | tracrRNA | UUGAGAUGCAAACCGAUUC | — |
| | Portion 1- | UCCUGACUGCAAGCCAGUC | |
| | partial | ACACCGGUAACAAGAGCAU | |
| | | UUC (SEQ ID NO: 1010) | |
| | | OMNI-314 | OMNI-315 |
| | sgRNA V1 | AUUUUAGUUCCCUUUUAUU | GUUUUAGUUCUCUGAUGGgaaaC |
| | sequence | gaaaAACAAAAGGUUACUAA | CAUCAAUGAGUUCUAAGAUAAG |
| | | AACAAGGGAUUUAUUCCCG | GCAAUAUGCCGUGGGGUAUGGU |
| | | CAAAGCUCUAAUCCGACAA | GGUAACCUCAAAAGCGAUCCAC |
| | | UAAACGUUGUCGGAUUAUC | CUUUGAUAAACGUACCGUCUGG |
| | | UUUUUU (SEQ ID NO: 1030) | UGCGUUUUUCUUUUUU (SEQ ID |
| | | | NO: 1051) |
| crRNA: tracr | crRNA | AUUUUAGUUCCCUUUUAUU | GUUUUAGUUCUCUGAUGG (SEQ |
| RNA duplex | (Repeat) | (SEQ ID NO: 1031) | ID NO: 1052) |
| V1 sequences | Partial | AUUUUAGUUCCCUUU (SEQ | GUUUUAGUUCUCUGA (SEQ ID |
| | crRNA 1 | ID NO: 1032) | NO: 1053) |
| | Partial | AUUUUAGUUCCC (SEQ ID | GUUUUAGUUCUC (SEQ ID NO: |
| | crRNA 2 | NO: 1033) | 1054) |
| | Partial | AUUUUAGUUC (SEQ ID NO: | GUUUUAGUUC (SEQ ID NO: 1055) |
| | crRNA 3 | 1034) | |
| | tracrRNA | AACAAAAGGUUACUAAAA | CCAUCAAUGAGUUCUAAGAU |
| | (Antirepeat) | (SEQ ID NO: 1035) | (SEQ ID NO: 1056) |
| | Partial | AAAGGUUACUAAAA (SEQ | UCAAUGAGUUCUAAGAU (SEQ ID |
| | tracrRNA 1 | ID NO: 1036) | NO: 1057) |
| | Partial | GGUUACUAAAA (SEQ ID NO: | AUGAGUUCUAAGAU (SEQ ID NO: |
| | tracrRNA 2 | 1037) | 1058) |
| | Partial | UUACUAAAA | GUUCUAAGAU (SEQ ID NO: 1059) |
| | tracrRNA 3 | | |
| tracrRNA V1 | tracrRNA | CAAGGGAUUUAUUCCCGC | AAGGCAAUAUGCCGUGGGGUAU |
| sequences | Portion 1 | (SEQ ID NO: 1038) | (SEQ ID NO: 1060) |
| | tracrRNA | CAAGGGAUUUAUUCCC | AAGGCAAUAUGCCGUGGGGUAU |
| | Portion 1- | (SEQ ID NO: 1039) | (SEQ ID NO: 1061) |
| | partial | | |
| | tracrRNA | AAAGCUCUAAUCCGACAAU | GGUGGUAACCUCAAAAGCGAUC |
| | Portion 2 | AAACGUUGUCGGAUUAUCU | CACCUUU (SEQ ID NO: 1062) |
| | | UUUUU (SEQ ID NO: 1040) | |
| | tracrRNA | AAAGCUCUAAUCCGACAAU | GGUGGUAACCUCAAAAGCGAUC |
| | Portion 2- | AAACGUUGUCGGAUUAUCU | CACC (SEQ ID NO: 1063) |
| | partial | UU (SEQ ID NO: 1041) | |
| | tracrRNA | AAAGCUCUAAUCCGACAAU | — |
| | Portion 2- | AAACGUUGUCGGAUUAUC | |
| | without | (SEQ ID NO: 1042) | |
| | polyT | | |
| | tracrRNA | — | GAUAAACGUACCGUCUGGUGCG |
| | Portion 3 | | UUUUUCUUUUUU (SEQ ID NO: |
| | | | 1064) |
| | tracrRNA | — | GAUAAACGUACCGUCUGGUGCG |
| | Portion 3- | | UUUUUC (SEQ ID NO: 1065) |
| | partial | | |
| | tracrRNA | — | GAUAAACGUACCGUCUGGUGCG |
| | Portion 3- | | UUUUUC (SEQ ID NO: 1066) |
| | without | | |
| | polyT | | |
| | sgRNA V2 | AUUCUAGUUCCCUUCUAUU | GUCUUAGUUCUCUGAUGGgaaaCC |
| | sequence | gaaaAACAGAAGGUUACUAG | AUCAAUGAGUUCUAAGAUAAGG |
| | | AACAAGGGAUUUAUUCCCG | CAAUAUGCCGUGGGGUAUGGUG |
| | | CAAAGCUCUAAUCCGACAA | GUAACCUCAAAAGCGAUCCACC |
| | | UAAACGUUGUCGGAUUAUC | UUUGAUAAACGUACCGUCUGGU |
| | | UUUUUU (SEQ ID NO: 1043) | GCGUUUCUCUUUUUU (SEQ ID |
| | | | NO: 1067) |
| | crRNA | AUUCUAGUUCCCUUCUAUU | GUCUUAGUUCUCUGAUGG (SEQ |
| | (Repeat) | (SEQ ID NO: 1044) | ID NO: 1068) |
| | | OMNI-314 | OMNI-315 |
| crRNA: tracr | Partial | AUUCUAGUUCCCUUC (SEQ | GUCUUAGUUCUCUGA (SEQ ID |
| RNA duplex | crRNA 1 | ID NO: 1045) | NO: 1069) |
| V2 sequences | Partial | AUUCUAGUUCCC (SEQ ID | GUCUUAGUUCUC (SEQ ID NO: |
| | crRNA 2 | NO: 1046) | 1070) |
| | Partial | AUUCUAGUUC (SEQ ID NO: | GUCUUAGUUC (SEQ ID NO: 1071) |
| | crRNA 3 | 1047) | |
| | tracrRNA | AACAGAAGGUUACUAGAA | — |
| | (Antirepeat) | (SEQ ID NO: 1048) | |
| | Partial | GAAGGUUACUAGAA (SEQ | — |
| | tracrRNA 1 | ID NO: 1049) | |
| | Partial | GGUUACUAGAA (SEQ ID NO: | |
| | tracrRNA 2 | 1050) | |
| | Partial | UUACUAGAA | — |
| | tracrRNA 3 | | |
| tracrRNA V2 | tracrRNA | — | GAUAAACGUACCGUCUGGUGCG |
| sequences | Portion 3 | | UUUCUCUUUUUU (SEQ ID NO: |
| | | | 1072) |
| | tracrRNA | — | GAUAAACGUACCGUCUGGUGCG |
| | Portion 3- | | UUUCUC (SEQ ID NO: 1073) |
| | partial | | |
| | tracrRNA | — | GAUAAACGUACCGUCUGGUGCG |
| | Portion 3- | | UUUCUC (SEQ ID NO: 1074) |
| | without | | |
| | polyT | | |
| | sgRNA V3 | — | GUUUUAGUUCUCUGAUGGgaaaC |
| | sequence | | CAUCAAUGAGUUCUAAGAUAAG |
| | | | GCAAUAUGCCGUGGGGUAUGGU |
| | | | GGUAACCUCAAAAGCGAUCCAC |
| | | | CUUUGAUAAACGUACCGUCUGG |
| | | | UGCGUUUUUU (SEQ ID NO: 1075) |
| tracrRNA V3 | tracrRNA | — | GGUGGUAACCUCAAAAGCGAUC |
| sequences | Portion 2 | | CACCUUUGAU (SEQ ID NO: 1076) |
| | tracrRNA | | AAACGUACCGUCUGGUGCGUUU |
| | Portion 3 | | UUU (SEQ ID NO: 1077) |
| | tracrRNA | — | AAACGUACCGUCUGGUGCGUUU |
| | Portion 3- | | (SEQ ID NO: 1078) |
| | partial | | |
| | tracrRNA | — | AAACGUACCGUCUGGUGCG (SEQ |
| | Portion 3- | | ID NO: 1079) |
| | without | | |
| | polyT | | |
| | sgRNA V4 | — | GUCUUAGUUCUCUGAUGGgaaaCC |
| | sequence | | AUCAAUGAGUUCUAAGAUAAGG |
| | | | CAAUAUGCCGUGGGGUAUGGUG |
| | | | GUAACCUCAAAAGCGAUCCACC |
| | | | UUUGAUAAACGUACCGUCUGGU |
| | | | GCGUUUUUU (SEQ ID NO: 1080) |
| | | OMNI-316 | OMNI-317 |
| | sgRNA V1 | AUUUUAGUUCCCUAAUUUU | GCUGUAGCCCCCUGUUAUUgaaaA |
| | sequence | gaaaAAAGUUAGGUUACUAA | GUAACACGUCGCUACAGUAAGG |
| | | AACAAGGGUUCCUUACGAG | CUCCGUCGUGGACGGAUGCCGC |
| | | GAGACCCGCAAAGCUCUAA | AAAGCUCUAAACCCAUUCUUCG |
| | | GUUCGCUGGGUUUCUCAGC | GAAUGGGUUUAUCUUUUUU |
| | | GGACUUAUCUUUUUUU | (SEQ ID NO: 1102) |
| | | (SEQ ID NO: 1081) | |
| crRNA: tracr | crRNA | AUUUUAGUUCCCUAAUUUU | GCUGUAGCCCCCUGUUAUU (SEQ |
| RNA duplex | (Repeat) | (SEQ ID NO: 1082) | ID NO: 1103) |
| V1 sequences | Partial | AUUUUAGUUCCCUAA (SEQ | GCUGUAGCCCCCUGU (SEQ ID |
| | crRNA 1 | ID NO: 1083) | NO: 1104) |
| | Partial | AUUUUAGUUCCC (SEQ ID | GCUGUAGCCCCC (SEQ ID NO: |
| | crRNA 2 | NO: 1084) | 1105) |
| | Partial | AUUUUAGUUC (SEQ ID NO: | GCUGUAGCCC (SEQ ID NO: 1106) |
| | crRNA 3 | 1085) | |
| | tracrRNA | AAAGUUAGGUUACUAAAA | AGUAACACGUCGCUACAGU (SEQ |
| | (Antirepeat) | (SEQ ID NO: 1086) | ID NO: 1107) |
| | Partial | UUAGGUUACUAAAA (SEQ | ACACGUCGCUACAGU (SEQ ID |
| | tracrRNA 1 | ID NO: 1087) | NO: 1108) |
| | Partial | GGUUACUAAAA (SEQ ID NO: | CGUCGCUACAGU (SEQ ID NO: |
| | tracrRNA 2 | 1088) | 1109) |
| | Partial | UUACUAAAA | UCGCUACAGU (SEQ ID NO: 1110) |
| | tracrRNA 3 | | |
| tracrRNA V1 | tracrRNA | CAAGGGUUCCUUACGAGGA | AAGGCUCCGUCGUGGACGGAUG |
| sequences | Portion 1 | GACCCGC (SEQ ID NO: 1089) | CCGC (SEQ ID NO: 1111) |
| | tracrRNA | CAAGGGUUCCUUACGAGGA | AAGGCUCCGUCGUGGACGGAUG |
| | Portion 1- | GACCC (SEQ ID NO: 1090) | CC (SEQ ID NO: 1112) |
| | partial | | |
| | tracrRNA | AAAGCUCUAAGUUCGCUGG | AAAGCUCUAAACCCAUUCUUCG |
| | Portion 2 | GUUUCUCAGCGGACUUAUC | GAAUGGGUUUAUCUUUUUU |
| | | UUUUUUU (SEQ ID NO: 1091) | (SEQ ID NO: 1113) |
| | tracrRNA | AAAGCUCUAAGUUCGCUGG | AAAGCUCUAAACCCAUUCUUCG |
| | Portion 2- | GUUUCUCAGCGGACUUAUC | GAAUGGGUUUAUCUUU (SEQ ID |
| | partial | UUU (SEQ ID NO: 1092) | NO: 1114) |
| | tracrRNA | AAAGCUCUAAGUUCGCUGG | AAAGCUCUAAACCCAUUCUUCG |
| | Portion 2- | GUUUCUCAGCGGACUUAUC | GAAUGGGUUUAUC (SEQ ID NO: |
| | without | (SEQ ID NO: 1093) | 1115) |
| | polyT | | |
| | sgRNA V2 | AUUCUAGUUCCCUAACUUU | — |
| | sequence | gaaaAAAGUUAGGUUACUAG | |
| | | AACAAGGGUUCCUUACGAG | |
| | | GAGACCCGCAAAGCUCUAA | |
| | | GUUCGCUGGGUUUCUCAGC | |
| | | GGACUUAUCUUUUUUU | |
| | | (SEQ ID NO: 1094) | |
| crRNA: tracr | crRNA | AUUCUAGUUCCCUAACUUU | — |
| RNA duplex | (Repeat) | (SEQ ID NO: 1095) | |
| V2 sequences | Partial | AUUCUAGUUCCCUAA (SEQ | — |
| | crRNA 1 | ID NO: 1096) | |
| | Partial | AUUCUAGUUCCC (SEQ ID | — |
| | crRNA 2 | NO: 1097) | |
| | Partial | AUUCUAGUUC (SEQ ID NO: | — |
| | crRNA 3 | 1098) | |
| | tracrRNA | AAAGUUAGGUUACUAGAA | — |
| | (Antirepeat) | (SEQ ID NO: 1099) | |
| | Partial | UUAGGUUACUAGAA (SEQ | — |
| | tracrRNA 1 | ID NO: 1100) | |
| | Partial | GGUUACUAGAA (SEQ ID NO: | — |
| | tracrRNA 2 | 1101) | |
| | Partial | UUACUAGAA | — |
| | tracrRNA 3 | | |
| | | OMNI-318 | OMNI-319 |
| | sgRNA V1 | GUUAUAGUUCCCUAACAAU | AUUUUAGUACCUGAAAAAAgaaa |
| | sequence | gaaaAUUGUUUUAGGUUUCU | UUUUUUCAGAAUCUACUAAAAC |
| | | AUAAUAAUUUAGCAACUUA | AAGGCUUUAUGCCGAAAUCAAG |
| | | GGGCGGCGAUUUUGGUCGU | GACAUCGACGGAUGUCCUUUUU |
| | | GCAGCUACGGUUGAGAAUU | U (SEQ ID NO: 1136) |
| | | CUAUUGUGAAUCUAAAGCA | |
| | | AAGCUCUAAUCCGCUCACU | |
| | | AGUUGGGCGGAUUAUCUUU | |
| | | UUU (SEQ ID NO: 1116) | |
| crRNA: tracr | crRNA | GUUAUAGUUCCCUAACAAU | AUUUUAGUACCUGAAAAAA |
| RNA duplex | (Repeat) | (SEQ ID NO: 1117) | (SEQ ID NO: 1137) |
| V1 sequences | Partial | GUUAUAGUUCCCUAA (SEQ | AUUUUAGUACCUGAA (SEQ ID |
| | crRNA 1 | ID NO: 1118) | NO: 1138) |
| | Partial | GUUAUAGUUCCC (SEQ ID | AUUUUAGUACCU (SEQ ID NO: |
| | crRNA 2 | NO: 1119) | 1139) |
| | Partial | GUUAUAGUUC (SEQ ID NO: | AUUUUAGUAC (SEQ ID NO: 1140) |
| | crRNA 3 | 1120) | |
| | tracrRNA | AUUGUUUUAGGUUUCUAUA | UUUUUUCAGAAUCUACUAAAA |
| | (Antirepeat) | AU (SEQ ID NO: 1121) | (SEQ ID NO: 1141) |
| | Partial | UUUUAGGUUUCUAUAAU | UUCAGAAUCUACUAAAA (SEQ ID |
| | tracrRNA 1 | (SEQ ID NO: 1122) | NO: 1142) |
| | Partial | GGUUUCUAUAAU (SEQ ID | AGAAUCUACUAAAA (SEQ ID NO: |
| | tracrRNA 2 | NO: 1123) | 1143) |
| | Partial | UUUCUAUAAU (SEQ ID NO: | AAUCUACUAAAA (SEQ ID NO: |
| | tracrRNA 3 | 1124) | 1144) |
| tracrRNA V1 | tracrRNA | AAUUUAGCAACUUAGGGCG | CAAGGCUUUAUGCCGAAAUC |
| sequences | Portion 1 | GCGAUUUUGGUCGUGC | (SEQ ID NO: 1145) |
| | | (SEQ ID NO: 1125) | |
| | tracrRNA | — | CAAGGCUUUAUGCC (SEQ ID NO: |
| | Portion 1- | | 1146) |
| | partial | | |
| | tracrRNA | AGCUACGGUUGAGAAUUCU | AAGGACAUCGACGGAUGUCCUU |
| | Portion 2 | AUUGUGAAUCUAAAGCAAA | UUUU (SEQ ID NO: 1147) |
| | | GCUC (SEQ ID NO: 1126) | |
| | tracrRNA | AGCUACGGUUGAGAAUUCU | AAGGACAUCGACGGAUGUCCUU |
| | Portion 2- | AUUGUGAAUCUAAAGCAAA | (SEQ ID NO: 1148) |
| | partial | GCU (SEQ ID NO: 1127) | |
| | tracrRNA | — | AAGGACAUCGACGGAUGUCC |
| | Portion 2- | | (SEQ ID NO: 1149) |
| | without | | |
| | polyT | | |
| | tracrRNA | UAAUCCGCUCACUAGUUGG | — |
| | Portion 3 | GCGGAUUAUCUUUUUU | |
| | | (SEQ ID NO: 1128) | |
| | tracrRNA | UAAUCCGCUCACUAGUUGG | — |
| | Portion 3- | GCGGAUUA (SEQ ID NO: | |
| | partial | 1129) | |
| | tracrRNA | UAAUCCGCUCACUAGUUGG | — |
| | Portion 3- | GCGGAUUAUC (SEQ ID NO: | |
| | without | 1130) | |
| | polyT | | |
| | sgRNA V2 | GUUAUAGUUCCCUAACAAU | AUUCUAGUACCUGAAAGAAgaaa |
| | sequence | gaaaAUUGUUCUAGGUUUCU | UUCUUUCAGAAUCUACUAGAAC |
| | | AUAAUAAUUUAGCAACUUA | AAGGCUUUAUGCCGAAAUCAAG |
| | | GGGCGGCGAUCUUGGUCGU | GACAUCGACGGAUGUCCUUUUU |
| | | GCAGCUACGGUUGAGAAUU | U (SEQ ID NO: 1150) |
| | | CUAUUGUGAAUCUAAAGCA | |
| | | AAGCUCUAAUCCGCUCACU | |
| | | AGUUGGGCGGAUUAUCUUU | |
| | | UUU (SEQ ID NO: 1131) | |
| crRNA: tracr | crRNA | | AUUCUAGUACCUGAAAGAA |
| RNA duplex | (Repeat) | | (SEQ ID NO: 1151) |
| V2 sequences | Partial | — | AUUCUAGUACCUGAA (SEQ ID |
| | crRNA 1 | | NO: 1152) |
| | Partial | — | AUUCUAGUACCU (SEQ ID NO: |
| | crRNA 2 | | 1153) |
| | Partial | — | AUUCUAGUAC (SEQ ID NO: 1154) |
| | crRNA 3 | | |
| | tracrRNA | AUUGUUCUAGGUUUCUAUA | UUCUUUCAGAAUCUACUAGAA |
| | (Antirepeat) | AU (SEQ ID NO: 1132) | (SEQ ID NO: 1155) |
| | Partial | UUCUAGGUUUCUAUAAU | UUCAGAAUCUACUAGAA (SEQ ID |
| | tracrRNA 1 | (SEQ ID NO: 1133) | NO: 1156) |
| | Partial | | AGAAUCUACUAGAA (SEQ ID NO: |
| | tracrRNA 2 | | 1157) |
| | Partial | | AAUCUACUAGAA (SEQ ID NO: |
| | tracrRNA 3 | | 1158) |
| tracrRNA V2 | tracrRNA | AAUUUAGCAACUUAGGGCG | — |
| sequences | Portion 1 | GCGAUCUUGGUCGUGC | |
| | | (SEQ ID NO: 1134) | |
| | tracrRNA | AAUUUAGCAACUUAGGGCG | — |
| | Portion 2 | GCGAUCUUGGUCGUGCAGC | |
| | | UACGGUUG (SEQ ID NO: | |
| | | 1135) | |
| | sgRNA V3 | | AUUUUAGUACCUGAAAAAAgaaa |
| | sequence | | UUUUUUCAGAAUCUACUAAAAC |
| | | | AAGGCUUUAUGCCGAAAUCAAG |
| | | | GACAUCGACGGAUGUCCUUUUU |
| | | | UCUUUGCAUUUUUU (SEQ ID NO: |
| | | | 1159) |
| tracrRNA V3 | tracrRNA | — | CAAGGCUUUAUGCC (SEQ ID NO: |
| sequences | Portion 1 | | 1160) |
| | tracrRNA | — | GAAAUCAAGGACAUCGACGGAU |
| | Portion 2 | | GUCCUUUUUUCUUUGCAUUUUU |
| | | | U (SEQ ID NO:1161) |
| | tracrRNA | — | GAAAUCAAGGACAUCGACGGAU |
| | Portion 2- | | GUCCUUUUUUC (SEQ ID NO: |
| | partial | | 1162) |
| | tracrRNA | — | GAAAUCAAGGACAUCGACGGAU |
| | Portion 2- | | GUCCUUUUUUCUUUGCA (SEQ ID |
| | without | | NO: 1163) |
| | polyT | | |
| | sgRNA V4 | — | AUUCUAGUACCUGAAAGAAgaaa |
| | sequence | | UUCUUUCAGAAUCUACUAGAAC |
| | | | AAGGCUUUAUGCCGAAAUCAAG |
| | | | GACAUCGACGGAUGUCCUUCUU |
| | | | UCUUUGCAUUUUUU (SEQ ID NO: |
| | | | 1164) |
| tracrRNA V4 | tracrRNA | — | GAAAUCAAGGACAUCGACGGAU |
| sequences | Portion 2 | | GUCCUUCUUUCUUUGCAUUUUU |
| | | | U (SEQ ID NO: 1165) |
| | tracrRNA | — | GAAAUCAAGGACAUCGACGGAU |
| | Portion 2- | | GUCCUUCUUUC (SEQ ID NO: |
| | partial | | 1166) |
| | tracrRNA | | GAAAUCAAGGACAUCGACGGAU |
| | Portion 2- | | GUCCUUCUUUCUUUGCA (SEQ ID |
| | without | | NO: 1167) |
| | polyT | | |
| | | OMNI-320 | OMNI-321 |
| | sgRNA V1 | GCUGUAGUUCCCGGUUAUU | GUUUUAGUUCCCUAUUUUGgaaa |
| | sequence | gaaaAGUAACAGGUUUCUAC | UAAAAUAGGUUACUAAAAUAAA |
| | | AGUAAGGUAGAACACCUAA | GGUGGCAGUUUACUGCUACCUA |
| | | AAGCUCUAAUCCCAUUCUU | UGGUAAUUCGUAAGAAUUAUCC |
| | | CGGAAUGGGAUUAUCUUUU | AGUAAGUGGUUGCCGACGGGCA |
| | | UU (SEQ ID NO: 1168) | ACCUUUUUUU (SEQ ID NO: 1187) |
| crRNA: tracr | crRNA | GCUGUAGUUCCCGGUUAUU | GUUUUAGUUCCCUAUUUUG |
| RNA duplex | (Repeat) | (SEQ ID NO: 1169) | (SEQ ID NO: 1188) |
| V1 sequences | Partial | GCUGUAGUUCCCGGU (SEQ | GUUUUAGUUCCCUAU (SEQ ID |
| | crRNA 1 | ID NO: 1170) | NO: 1189) |
| | Partial | GCUGUAGUUCCC (SEQ ID | GUUUUAGUUCCC (SEQ ID NO: |
| | crRNA 2 | NO: 1171) | 1190) |
| | Partial | GCUGUAGUUC (SEQ ID NO: | GUUUUAGUUC (SEQ ID NO: 1191) |
| | crRNA 3 | 1172) | |
| | tracrRNA | AGUAACAGGUUUCUACAGU | UAAAAUAGGUUACUAAAAU |
| | (Antirepeat) | (SEQ ID NO: 1173) | (SEQ ID NO: 1192) |
| | Partial | ACAGGUUUCUACAGU (SEQ | AUAGGUUACUAAAAU (SEQ ID |
| | tracrRNA 1 | ID NO: 1174) | NO: 1193) |
| | Partial | AGUAACAGGUUUCUACAGU | GGUUACUAAAAU (SEQ ID NO: |
| | tracrRNA 2 | (SEQ ID NO: 1175) | 1194) |
| | Partial | UUUCUACAGU (SEQ ID NO: | UUACUAAAAU (SEQ ID NO: 1195) |
| | tracrRNA 3 | 1176) | |
| tracrRNA V1 | tracrRNA | AAGGUAGAACACCU (SEQ ID | AAAGGUGGCAGUUUACUGCUAC |
| sequences | Portion 1 | NO: 1177) | CUA (SEQ ID NO: 1196) |
| | tracrRNA | AAGGUAGAACACCU (SEQ ID | AAAGGUGGCAGUUUACUGCUAC |
| | Portion 1- | NO: 1178) | CU (SEQ ID NO: 1197) |
| | partial | | |
| | tracrRNA | AAAAGCUCUAAUCCCAUUC | UGGUAAUUCGUAAGAAUUAUCC |
| | Portion 2 | UUCGGAAUGGGAUUAUCUU | AGUAAGU (SEQ ID NO: 1198) |
| | | UUUU (SEQ ID NO: 1179) | |
| | tracrRNA | AAAAGCUCUAAUCCCAUUC | UGGUAAUUCGUAAGAAUUAUCC |
| | Portion 2- | UUCGGAAUGGGAUUAUCUU | A (SEQ ID NO: 1199) |
| | partial | UU (SEQ ID NO: 1180) | |
| | tracrRNA | AAAAGCUCUAAUCCCAUUC | — |
| | Portion 2- | UUCGGAAUGGGAUUAUC | |
| | without | (SEQ ID NO: 1181) | |
| | polyT | | |
| | tracrRNA | — | GGUUGCCGACGGGCAACCUUUU |
| | Portion 3 | | UUU (SEQ ID NO: 1200) |
| | tracrRNA | — | GGUUGCCGACGGGCAACC (SEQ |
| | Portion 3- | | ID NO: 1201) |
| | partial | | |
| | tracrRNA | — | GGUUGCCGACGGGCAACC (SEQ |
| | Portion 3- | | ID NO: 1202) |
| | without | | |
| | polyT | | |
| | sgRNA V2 | — | GUUCUAGUUCCCUAUUCUGgaaaU |
| | sequence | | AGAAUAGGUUACUAGAAUAAAG |
| | | | GUGGCAGUUUACUGCUACCUAU |
| | | | GGUAAUUCGUAAGAAUUAUCCA |
| | | | GUAAGUGGUUGCCGACGGGCAA |
| | | | CCUUUUUUU (SEQ ID NO: 1203) |
| crRNA: tracr | crRNA | — | GUUCUAGUUCCCUAUUCUG (SEQ |
| RNA duplex | (Repeat) | | ID NO: 1204) |
| V2 sequences | Partial | — | GUUCUAGUUCCCUAU (SEQ ID |
| | crRNA 1 | | NO: 1205) |
| | Partial | — | GUUCUAGUUCCC (SEQ ID NO: |
| | crRNA 2 | | 1206) |
| | Partial | — | GUUCUAGUUC (SEQ ID NO: 1207) |
| | crRNA 3 | | |
| | tracrRNA | — | UAGAAUAGGUUACUAGAAU |
| | (Antirepeat) | | (SEQ ID NO: 1208) |
| | Partial | — | AUAGGUUACUAGAAU (SEQ ID |
| | tracrRNA 1 | | NO: 1209) |
| | Partial | — | GGUUACUAGAAU (SEQ ID NO: |
| | tracrRNA 2 | | 1210) |
| | Partial | — | UUACUAGAAU (SEQ ID NO: 1211) |
| | tracrRNA 3 | | |
| | sgRNA V3 | GCUGUAGUUCCCGGUUAUU | — |
| | sequence | gaaaAGUAACAGGUUUCUAC | |
| | | AGUAAGGUAGAACACCUAA | |
| | | AAGCUCUAAUCCCAUUCUU | |
| | | CGGAAUGGGAUUAUUUUUU | |
| | | (SEQ ID NO: 1182) | |
| tracrRNA V3 | tracrRNA | AAGGUAGAACACCUAAAAG | — |
| sequences | Portion 1 | CUC (SEQ ID NO: 1183) | |
| | tracrRNA | UAAUCCCAUUCUUCGGAAU | — |
| | Portion 2 | GGGAUUAUUUUUU (SEQ ID | |
| | | NO: 1184) | |
| | tracrRNA | UAAUCCCAUUCUUCGGAAU | — |
| | Portion 2- | GGGAUUA (SEQ ID NO: 1185) | |
| | partial | | |
| | tracrRNA | UAAUCCCAUUCUUCGGAAU | — |
| | Portion 2- | GGGAUUA (SEQ ID NO: 1186) | |
| | without | | |
| | polyT | | |
| | | OMNI-322 | OMNI-323 |
| | sgRNA V1 | GUUUUAGUUUCUUAAUUAU | GUUAUAGUUGACCGUgaaaACGG |
| | sequence | gaaaUUAAUUAAGCUACUAA | UCAACACAUAUAUAAUAAGGCU |
| | | AAUAAUGGCAGGCGAAAGC | GAAAAUGCCGUAAGAUGAGGGG |
| | | CUUGUCCAGUAAGUGACCA | GCGAUGCGUUGCCCCCAUUAUU |
| | | CCUUAUGGGUGGUCUUUUU | UUUU (SEQ ID NO: 1244) |
| | | UU (SEQ ID NO: 1212) | |
| crRNA: tracr | crRNA | GUUUUAGUUUCUUAAUUAU | GUUAUAGUUGACCGU (SEQ ID |
| RNA duplex | (Repeat) | (SEQ ID NO: 1213) | NO: 1245) |
| V1 sequences | Partial | GUUUUAGUUUCUUAA (SEQ | — |
| | crRNA 1 | ID NO: 1214) | |
| | Partial | GUUUUAGUUUCU (SEQ ID | GUUAUAGUUGAC (SEQ ID NO: |
| | crRNA 2 | NO: 1215) | 1246) |
| | Partial | GUUUUAGUUU (SEQ ID NO: | GUUAUAGUUG (SEQ ID NO: 1247) |
| | crRNA 3 | 1216) | |
| | tracrRNA | UUAAUUAAGCUACUAAAAU | ACGGUCAACACAUAUAUAAU |
| | (Antirepeat) | (SEQ ID NO: 1217) | (SEQ ID NO: 1248) |
| | Partial | UUAAGCUACUAAAAU (SEQ | — |
| | tracrRNA 1 | ID NO: 1218) | |
| | Partial | AGCUACUAAAAU (SEQ ID | GUCAACACAUAUAUAAU (SEQ ID |
| | tracrRNA 2 | NO: 1219) | NO: 1249) |
| | Partial | CUACUAAAAU (SEQ ID NO: | CAACACAUAUAUAAU (SEQ ID |
| | tracrRNA 3 | 1220) | NO: 1250) |
| tracrRNA V1 | tracrRNA | AAUGGCAGGCGAAAGCCUU | AAGGCUGAAAAUGCCGU (SEQ ID |
| sequences | Portion 1 | GUCCAGUAAGU (SEQ ID NO: | NO: 1251) |
| | | 1221) | |
| | tracrRNA | AAUGGCAGGCGAAAGCCUU | AAGGCUGAAAAUGCC (SEQ ID |
| | Portion 1- | GUCCA (SEQ ID NO: 1222) | NO: 1252) |
| | partial | | |
| | tracrRNA | GACCACCUUAUGGGUGGUC | AAGAUGAGGGGGCGAUGCGUUG |
| | Portion 2 | UUUUUUU (SEQ ID NO: 1223) | CCCCCAUUAUUUUUU (SEQ ID |
| | | | NO: 1253) |
| | tracrRNA | GACCACCUUAUGGGUGGUC | AAGAUGAGGGGGCGAUGCGUUG |
| | Portion 2- | (SEQ ID NO: 1224) | CCCCCAUUAUUUU (SEQ ID NO: |
| | partial | | 1254) |
| | tracrRNA | GACCACCUUAUGGGUGGUC | AAGAUGAGGGGGCGAUGCGUUG |
| | Portion 2- | (SEQ ID NO: 1225) | CCCCCAUUA (SEQ ID NO: 1255) |
| | without | | |
| | polyT | | |
| | sgRNA V2 | GUUCUAGUUUCUUAAUUAU | — |
| | sequence | gaaaUUAAUUAAGCUACUAG | |
| | | AAUAAUGGCAGGCGAAAGC | |
| | | CUUGUCCAGUAAGUGACCA | |
| | | CCUUAUGGGUGGUCUUUUU | |
| | | UU (SEQ ID NO: 1226) | |
| crRNA: tracr | crRNA | GUUCUAGUUUCUUAAUUAU | — |
| RNA duplex | (Repeat) | (SEQ ID NO: 1227) | |
| V2 sequences | Partial | GUUCUAGUUUCUUAA (SEQ | — |
| | crRNA 1 | ID NO: 1228) | |
| | Partial | GUUCUAGUUUCU (SEQ ID | — |
| | crRNA 2 | NO: 1229) | |
| | Partial | GUUCUAGUUU (SEQ ID NO: | — |
| | crRNA 3 | 1230) | |
| | tracrRNA | UUAAUUAAGCUACUAGAAU | — |
| | (Antirepeat) | (SEQ ID NO: 1231) | |
| | Partial | UUAAGCUACUAGAAU (SEQ | — |
| | tracrRNA 1 | ID NO: 1232) | |
| | Partial | AGCUACUAGAAU (SEQ ID | — |
| | tracrRNA 2 | NO: 1233) | |
| | Partial | CUACUAGAAU (SEQ ID NO: | — |
| | tracrRNA 3 | 1234) | |
| | sgRNA V3 | GUUUUAGUUUCUUAAUUAU | |
| | sequence | gaaaUUAAUUAAGCUACUAA | |
| | | AAUAAUGGCAGGCGAAAGC | |
| | | CUUGUCCAGUAAGUGACCA | |
| | | CCUUAUGGGUGGUCUUUUU | |
| | | UUGCGAACUUUUUU (SEQ | |
| | | ID NO: 1235) | |
| tracrRNA V3 | tracrRNA | AAUGGCAGGCGAAAGCCUU | — |
| sequences | Portion 1 | GUCCA (SEQ ID NO: 1236) | |
| | tracrRNA | GUAAGUGACCACCUUAUGG | — |
| | Portion 2 | GUGGUCUUUUUUUGCGAAC | |
| | | UUUUUU (SEQ ID NO: 1237) | |
| | tracrRNA | GUAAGUGACCACCUUAUGG | — |
| | Portion 2- | GUGGUCUUUUUUUGC (SEQ | |
| | partial | ID NO: 1238) | |
| | tracrRNA | GUAAGUGACCACCUUAUGG | — |
| | Portion 2- | GUGGUCUUUUUUUGCGAAC | |
| | without | (SEQ ID NO: 1239) | |
| | polyT | | |
| | sgRNA V4 | GUUCUAGUUUCUUAAUUAU | — |
| | sequence | gaaaUUAAUUAAGCUACUAG | |
| | | AAUAAUGGCAGGCGAAAGC | |
| | | CUUGUCCAGUAAGUGACCA | |
| | | CCUUAUGGGUGGUCUUUCU | |
| | | UUGCGAACUUUUUU (SEQ | |
| | | ID NO: 1240) | |
| tracrRNA V4 | tracrRNA | GUAAGUGACCACCUUAUGG | — |
| sequences | Portion 2 | GUGGUCUUUCUUUGCGAAC | |
| | | UUUUUU (SEQ ID NO: 1241) | |
| | tracrRNA | GUAAGUGACCACCUUAUGG | — |
| | Portion 2- | GUGGUCUUUCUUUGC (SEQ | |
| | partial | ID NO: 1242) | |
| | tracrRNA | GUAAGUGACCACCUUAUGG | — |
| | Portion 2- | GUGGUCUUUCUUUGCGAAC | |
| | without | (SEQ ID NO: 1243) | |
| | polyT | | |
| | | OMNI-324 | OMNI-325 |
| | sgRNA V1 | GUUUUAGUUCUCUGAUGAg | GUUGUUGUUCCCGGUUAUCgaaa |
| | sequence | aaaUCAUCAAGAGUUCUAAG | GAUAUACGGUUACAACAAUAAG |
| | | AUAAGGCAUUAUGCCGUAG | ACCUCCAUCUUUUUGAUGGUGU |
| | | GGUAUAGCGGUAUCCCAAA | GUCUCAGGCUCUGAUCCCAUCU |
| | | ACACUCCGCUCAUUUUUU | AAAGUUAAUUCUUUAGGUGGGA |
| | | (SEQ ID NO: 1256) | UUAUCCAUUUUUU (SEQ ID NO: |
| | | | 1285) |
| crRNA: tracr | crRNA | GUUUUAGUUCUCUGAUGA | GUUGUUGUUCCCGGUUAUC (SEQ |
| RNA duplex | (Repeat) | (SEQ ID NO: 1257) | ID NO: 1286) |
| V1 sequences | Partial | GUUUUAGUUCUCUGA (SEQ | GUUGUUGUUCCCGGU (SEQ ID |
| | crRNA 1 | ID NO: 1258) | NO: 1287) |
| | Partial | GUUUUAGUUCUC (SEQ ID | GUUGUUGUUCCC (SEQ ID NO: |
| | crRNA 2 | NO: 1259) | 1288) |
| | Partial | GUUUUAGUUC (SEQ ID NO: | GUUGUUGUUC (SEQ ID NO: 1289) |
| | crRNA 3 | 1260) | |
| | tracrRNA | UCAUCAAGAGUUCUAAGAU | GAUAUACGGUUACAACAAU |
| | (Antirepeat) | (SEQ ID NO: 1261) | (SEQ ID NO: 1290) |
| | Partial | UCAAGAGUUCUAAGAU | UACGGUUACAACAAU (SEQ ID |
| | tracrRNA 1 | (SEQ ID NO: 1262) | NO: 1291) |
| | Partial | AGAGUUCUAAGAU (SEQ ID | GGUUACAACAAU (SEQ ID NO: |
| | tracrRNA 2 | NO: 1263) | 1292) |
| | Partial | GUUCUAAGAU (SEQ ID NO: | UUACAACAAU (SEQ ID NO: 1293) |
| | tracrRNA 3 | 1264) | |
| tracrRNA V1 | tracrRNA | AAGGCAUUAUGCCGUAGGG | AAGACCUCCAUCUUUUUGAUGG |
| sequences | Portion 1 | UAUA (SEQ ID NO: 1265) | UGUGUCUCA (SEQ ID NO: 1294) |
| | tracrRNA | AAGGCAUUAUGCCGUAGGG | AAGACCUCCAUCUUUUUGAUGG |
| | Portion 1- | UAUA (SEQ ID NO: 1266) | UGUGUCU (SEQ ID NO: 1295) |
| | partial | | |
| | tracrRNA | GCGGUAUCCCAAAACACUC | GGCUCUGAUCCCAUCUAAAGUU |
| | Portion 2 | CGCUCAUUUUUU (SEQ ID | AAUUCUUUAGGUGGGAUUAUCC |
| | | NO: 1267) | AUUUUUU (SEQ ID NO: 1296) |
| | tracrRNA | GCGGUAUCCCAAAACACUC | GGCUCUGAUCCCAUCUAAAGUU |
| | Portion 2- | CGC (SEQ ID NO: 1268) | AAUUCUUUAGGUGGGAUUAUCC |
| | partial | | (SEQ ID NO: 1297) |
| | tracrRNA | GCGGUAUCCCAAAACACUC | GGCUCUGAUCCCAUCUAAAGUU |
| | Portion 2- | CGCUCA (SEQ ID NO: 1269) | AAUUCUUUAGGUGGGAUUAUCC |
| | without | | A (SEQ ID NO: 1298) |
| | polyT | | |
| | sgRNA V2 | GUCUUAGUUCUCUGAUGAg | — |
| | sequence | aaaUCAUCAAGAGUUCUAAG | |
| | | AUAAGGCAUUAUGCCGUAG | |
| | | GGUAUAGCGGUAUCCCAAA | |
| | | ACACUCCGCUCAUUUUUU | |
| | | (SEQ ID NO: 1270) | |
| crRNA: tracr | crRNA | GUCUUAGUUCUCUGAUGA | — |
| RNA duplex | (Repeat) | (SEQ ID NO: 1271) | |
| V2 sequences | Partial | GUCUUAGUUCUCUGA (SEQ | — |
| | crRNA 1 | ID NO: 1272) | |
| | Partial | GUCUUAGUUCUC (SEQ ID | |
| | crRNA 2 | NO: 1273) | |
| | Partial | GUCUUAGUUC (SEQ ID NO: | — |
| | crRNA 3 | 1274) | |
| | sgRNA V3 | GUUUUAGUUCUCUGAUGAg | — |
| | sequence | aaaUCAUCAAGAGUUCUAAG | |
| | | AUAAGGCAUUAUGCCGUAG | |
| | | GGUAUAGCGGUAUCCCAAA | |
| | | ACACUCCGCUCAUUUUGAU | |
| | | UGAUUAAGGUUGUUUCUUU | |
| | | AAUGGAACAACCUUUUUU | |
| | | (SEQ ID NO: 1275) | |
| tracrRNA V3 | tracrRNA | GCGGUAUCCCAAAACACUC | — |
| sequences | Portion 2 | CGCUCAUUUUGAUU (SEQ ID | |
| | | NO: 1276) | |
| | tracrRNA | GAUUAAGGUUGUUUCUUUA | — |
| | Portion 3 | AUGGAACAACCUUUUUU | |
| | | (SEQ ID NO: 1277) | |
| | tracrRNA | GAUUAAGGUUGUUUCUUUA | — |
| | Portion 3- | AUGGAACAACCUUUUUU | |
| | partial | (SEQ ID NO: 1278) | |
| | tracrRNA | GAUUAAGGUUGUUUCUUUA | — |
| | Portion 3- | AUGGAACAACC (SEQ ID NO: | |
| | without | 1279) | |
| | polyT | | |
| | sgRNA V4 | GUCUUAGUUCUCUGAUGAg | — |
| | sequence | aaaUCAUCAAGAGUUCUAAG | |
| | | AUAAGGCAUUAUGCCGUAG | |
| | | GGUAUAGCGGUAUCCCAAA | |
| | | ACACUCCGCUCAUUCUGAU | |
| | | UGAUUAAGGUUGUUUCUUU | |
| | | AAUGGAACAACCUUUUUU | |
| | | (SEQ ID NO: 1280) | |
| tracrRNA V4 | tracrRNA | AAGGCAUUAUGCCG (SEQ ID | — |
| sequences | Portion 1 | NO: 1281) | |
| | tracrRNA | AAGGCAUUAUGCC (SEQ ID | — |
| | Portion 1- | NO: 1282) | |
| | partial | | |
| | tracrRNA | UAGGGUAUAGCGGUAUCCC | — |
| | Portion 2 | AAAACACUCCGCUCAUUCU | |
| | | GAUU (SEQ ID NO: 1283) | |
| | tracrRNA | UAGGGUAUAGCGGUAUCCC | — |
| | Portion 2- | AAAACACUCCGCUCAUUCU | |
| | partial | G (SEQ ID NO: 1284) | |
| | | OMNI-326 | OMNI-327 |
| | sgRNA V1 | GUUGUUGUUCCCGGUUAUC | GUUCCUAUUAGGgaaaCCUCAACU |
| | sequence | gaaaGAUAAACGGUUACAAC | UAGGUAACAAGGGCAUUAAAGC |
| | | AAUAAGGUCCCGCCGCUGG | CCACAAAGGGAUUUAUUCCCAC |
| | | CGGUGUACCUCAAAGCUCU | UUAAAUUAGUUUUGAUUUGAUU |
| | | AAUCCCACUUAAAGUGAAU | GUAAAUAAUUAAAAAUCCUCAA |
| | | ACUUUAAGUGGGAUUAUCU | AAAGUAUGAGUUGCUCGUGCUU |
| | | AUUUUUU (SEQ ID NO: 1299) | UUUGGGGAUUUUUU (SEQ ID NO: |
| | | | 1313) |
| crRNA: tracr | crRNA | GUUGUUGUUCCCGGUUAUC | GUUCCUAUUAGG (SEQ ID NO: |
| RNA duplex | (Repeat) | (SEQ ID NO: 1300) | 1314) |
| V1 sequences | Partial | GUUGUUGUUCCCGGU (SEQ | — |
| | crRNA 1 | ID NO: 1301) | |
| | Partial | GUUGUUGUUCCC (SEQ ID | — |
| | crRNA 2 | NO: 1302) | |
| | Partial | GUUGUUGUUC (SEQ ID NO: | GUUCCUAUUA (SEQ ID NO: 1315) |
| | crRNA 3 | 1303) | |
| | tracrRNA | GAUAAACGGUUACAACAAU | CCUCAACUUAGGUAAC (SEQ ID |
| | (Antirepeat) | (SEQ ID NO: 1304) | NO: 1316) |
| | Partial | AACGGUUACAACAAU (SEQ | — |
| | tracrRNA 1 | ID NO: 1305) | |
| | Partial | GGUUACAACAAU (SEQ ID | — |
| | tracrRNA 2 | NO: 1306) | |
| | Partial | UUACAACAAU (SEQ ID NO: | UCAACUUAGGUAAC (SEQ ID NO: |
| | tracrRNA 3 | 1307) | 1317) |
| tracrRNA V1 | tracrRNA | AAGGUCCCGCCGCUGGCGG | AAGGGCAUUAAAGCCCACAAA |
| sequences | Portion 1 | UGUACCUCAAAGCUC (SEQ | (SEQ ID NO: 1318) |
| | | ID NO: 1308) | |
| | tracrRNA | AAGGUCCCGCCGCUGGCGG | AAGGGCAUUAAAGCCC (SEQ ID |
| | Portion 1- | UGUACCU (SEQ ID NO: 1309) | NO: 1319) |
| | partial | | |
| | tracrRNA | UAAUCCCACUUAAAGUGAA | GGGAUUUAUUCCCAC (SEQ ID |
| | Portion 2 | UACUUUAAGUGGGAUUAUC | NO: 1320) |
| | | UAUUUUUU (SEQ ID NO: | |
| | | 1310) | |
| | tracrRNA | UAAUCCCACUUAAAGUGAA | GGGAUUUAUUCCC (SEQ ID NO: |
| | Portion 2- | UACUUUAAGUGGGAUUA | 1321) |
| | partial | (SEQ ID NO: 1311) | |
| | tracrRNA | UAAUCCCACUUAAAGUGAA | — |
| | Portion 2- | UACUUUAAGUGGGAUUAUC | |
| | without | UA (SEQ ID NO: 1312) | |
| | polyT | | |
| | tracrRNA | — | UUAAAUUAGUUUUGAUUUGAUU |
| | Portion 3 | | GUAAAUAAUU (SEQ ID NO: 1322) |
| | tracrRNA | — | UUAAAUUAGUUUUGAUUUGA |
| | Portion 3- | | (SEQ ID NO: 1323) |
| | partial | | |
| | tracrRNA | — | AAAAAUCCUCAAAAAGUAUGAG |
| | Portion 4 | | UUGCUCGUGCUUUUUGGGGAUU |
| | | | UUUU (SEQ ID NO: 1324) |
| | tracrRNA | | AAAAAUCCUCAAAAAGUAUGAG |
| | Portion 4- | | UUGCUCGUGCUUUUUGGGGAUU |
| | partial | | UUU (SEQ ID NO: 1325) |
| | tracrRNA | — | AAAAAUCCUCAAAAAGUAUGAG |
| | Portion 4- | | UUGCUCGUGCUUUUUGGGGA |
| | without | | (SEQ ID NO: 1326) |
| | polyT | | |
| | sgRNA V2 | — | GUUCCUAUUAGGgaaaCCUCAACU |
| | sequence | | UAGGUAACAAGGGCAUUAAAGC |
| | | | CCACAAAGGGAUUUAUUCCCAC |
| | | | UUAAAUUAGUCUUGAUUUGAUU |
| | | | GUAAAUAAUUAAAAAUCCUCAA |
| | | | GAAGUAUGAGUUGCUCGUGCUU |
| | | | CUUGGGGAUUUUUU (SEQ ID NO: |
| | | | 1327) |
| tracrRNA V2 | tracrRNA | | UUAAAUUAGUCUUGAUUUGAUU |
| sequences | Portion 3 | | GUAAAUAAUU (SEQ ID NO: 1328) |
| | tracrRNA | | UUAAAUUAGUCUUGAUUUGA |
| | Portion 3- | | (SEQ ID NO: 1329) |
| | partial | | |
| | tracrRNA | — | AAAAAUCCUCAAGAAGUAUGAG |
| | Portion 4 | | UUGCUCGUGCUUCUUGGGGAUU |
| | | | UUUU (SEQ ID NO: 1330) |
| | tracrRNA | | AAAAAUCCUCAAGAAGUAUGAG |
| | Portion 4- | | UUGCUCGUGCUUCUUGGGGAUU |
| | partial | | UUU (SEQ ID NO: 1331) |
| | tracrRNA | — | AAAAAUCCUCAAGAAGUAUGAG |
| | Portion 4- | | UUGCUCGUGCUUCUUGGGGA |
| | without | | (SEQ ID NO: 1332) |
| | polyT | | |
| | sgRNA V3 | — | GUUCCUAUUAGGgaaaCCUCAACU |
| | sequence | | UAGGUAACAAGGGCAUUAAAGC |
| | | | CCACAAAGGGAUUUAUUCCCAC |
| | | | UUAAAUUAGUUUUUU (SEQ ID |
| | | | NO: 1333) |
| crRNA: tracr | crRNA | — | GUUCCUAUUAGG (SEQ ID NO: |
| RNA duplex | (Repeat) | | 1334) |
| V3 sequences | Partial | | GUUCCUAUUA (SEQ ID NO: 1335) |
| | crRNA 3 | | |
| | tracrRNA | | CCUCAACUUAGGUAAC (SEQ ID |
| | (Antirepeat) | | NO: 1336) |
| | Partial | | UCAACUUAGGUAAC (SEQ ID NO: |
| | tracrRNA 3 | | 1337) |
| tracrRNA V3 | tracrRNA | | AAGGGCAUUAAAGCCCACAAA |
| sequences | Portion 1 | | (SEQ ID NO: 1338) |
| | tracrRNA | — | AAGGGCAUUAAAGCCC (SEQ ID |
| | Portion 1- | | NO: 1339) |
| | partial | | |
| | tracrRNA | | GGGAUUUAUUCCCACUUAAAUU |
| | Portion 2 | | AGUUUUUU (SEQ ID NO: 1340) |
| | tracrRNA | | GGGAUUUAUUCCC (SEQ ID NO: |
| | Portion 2- | | 1341) |
| | partial | | |
| | tracrRNA | — | GGGAUUUAUUCCCACUUAAAUU |
| | Portion 2- | | AG (SEQ ID NO: 1342) |
| | without | | |
| | polyT | | |
| | | OMNI-329 | OMNI-330 |
| | sgRNA V1 | GUUUGAGAGCCUUGUUAgaa | GUUGUGGUUUGAUGUAGGAgaaa |
| | sequence | aUAACAAGGCAAGUUCAAA | UCCUACAUCUUAUCACAAUAAG |
| | | UAAAACUUUUGUCUAAUCA | GCCAUAAUGGCCGAAGGGUAAA |
| | | CUUAUUCGCAUUGGCGAAC | ACCUAUACUCCCGCUUCGGUGG |
| | | CGCUCUUCCUUUUCGGAAG | GAGUUUUUUU (SEQ ID NO: 1363) |
| | | AGUUUUUU (SEQ ID NO: | |
| | | 1343) | |
| crRNA: tracr | crRNA | GUUUGAGAGCCUUGUUA | GUUGUGGUUUGAUGUAGGA |
| RNA duplex | (Repeat) | (SEQ ID NO: 1344) | (SEQ ID NO: 1364) |
| V1 sequences | Partial | GUUUGAGAGCCUUGU (SEQ | GUUGUGGUUUGAUGU (SEQ ID |
| | crRNA 1 | ID NO: 1345) | NO: 1365) |
| | Partial | GUUUGAGAGCCU (SEQ ID | GUUGUGGUUUGA (SEQ ID NO: |
| | crRNA 2 | NO: 1346) | 1366) |
| | Partial | GUUUGAGAGC (SEQ ID NO: | GUUGUGGUUU (SEQ ID NO: 1367) |
| | crRNA 3 | 1347) | |
| | tracrRNA | UAACAAGGCAAGUUCAAAU | UCCUACAUCUUAUCACAAU (SEQ |
| | (Antirepeat) | (SEQ ID NO: 1348) | ID NO: 1368) |
| | Partial | ACAAGGCAAGUUCAAAU | ACAUCUUAUCACAAU (SEQ ID |
| | tracrRNA 1 | (SEQ ID NO: 1349) | NO: 1369) |
| | Partial | AGGCAAGUUCAAAU (SEQ | UCUUAUCACAAU (SEQ ID NO: |
| | tracrRNA 2 | ID NO: 1350) | 1370) |
| | Partial | GCAAGUUCAAAU (SEQ ID | UUAUCACAAU (SEQ ID NO: 1371) |
| | tracrRNA 3 | NO: 1351) | |
| tracrRNA V1 | tracrRNA | AAAACUUUUGUCUAAUCAC | AAGGCCAUAAUGGCCGA (SEQ ID |
| sequences | Portion 1 | UUAUUCGCAUUGGCGAACC | NO: 1372) |
| | | (SEQ ID NO: 1352) | |
| | tracrRNA | AAAACUUUUGUCUAAUCAC | AAGGCCAUAAUGGCC (SEQ ID |
| | Portion 1- | UUAUUCGCAUUGGCGAA | NO: 1373) |
| | partial | (SEQ ID NO: 1353) | |
| | tracrRNA | GCUCUUCCUUUUCGGAAGA | AGGGUAAAACCUAU (SEQ ID NO: |
| | Portion 2 | GUUUUUU (SEQ ID NO: 1354) | 1374) |
| | tracrRNA | GCUCUUCCUUUUCGGAAGA | AGGGUAAAACCU (SEQ ID NO: |
| | Portion 2- | GU (SEQ ID NO: 1355) | 1375) |
| | partial | | |
| | tracrRNA | GCUCUUCCUUUUCGGAAGA | — |
| | Portion 2- | G (SEQ ID NO: 1356) | |
| | without | | |
| | polyT | | |
| | tracrRNA | — | ACUCCCGCUUCGGUGGGAGUUU |
| | Portion 3 | | UUUU (SEQ ID NO: 1376) |
| | tracrRNA | — | ACUCCCGCUUCGGUGGGAGU |
| | Portion 3- | | (SEQ ID NO: 1377) |
| | partial | | |
| | tracrRNA | — | ACUCCCGCUUCGGUGGGAG (SEQ |
| | Portion 3- | | ID NO: 1378) |
| | without | | |
| | polyT | | |
| | sgRNA V2 | GUUUGAGAGCCUUGUUAgaa | — |
| | sequence | aUAACAAGGCAAGUUCAAA | |
| | | UAAAACUUCUGUCUAAUCA | |
| | | CUUAUUCGCAUUGGCGAAC | |
| | | CGCUCUUCCUUCUCGGAAG | |
| | | AGUUUUUU (SEQ ID NO: | |
| | | 1357) | |
| tracrRNA V2 | tracrRNA | AAAACUUCUGUCUAAUCAC | — |
| sequences | Portion 1 | UUAUUCGCAUUGGCGAACC | |
| | | (SEQ ID NO: 1358) | |
| | tracrRNA | AAAACUUCUGUCUAAUCAC | — |
| | Portion 1- | UUAUUCGCAUUGGCGAA | |
| | partial | (SEQ ID NO: 1359) | |
| | tracrRNA | GCUCUUCCUUCUCGGAAGA | — |
| | Portion 2 | GUUUUUU (SEQ ID NO: 1360) | |
| | tracrRNA | GCUCUUCCUUCUCGGAAGA | — |
| | Portion 2- | GU (SEQ ID NO: 1361) | |
| | partial | | |
| | tracrRNA | GCUCUUCCUUCUCGGAAGA | — |
| | Portion 2- | G (SEQ ID NO: 1362) | |
| | without | | |
| | polyT | | |
| | | OMNI-331 | OMNI-332 |
| | sgRNA V1 | GUUGUGAUUUGAUGUAGAA | GUUGUGGUUUGAUGUAGAAgaaa |
| | sequence | gaaaAUCUACAUCUUAUCAC | UUCUACAUCUUAUCACAAUAAG |
| | | AAUAAGGCUAUAUGCCGAA | GCUAUAUGCCGAAGGAUUUAUA |
| | | GGAUUUUAUCCUAUAGUCC | UCCUAUGUGCCCUCUUCGGAGG |
| | | CGCGUACUCCGUGGGACUU | GCAUUAUUUUUUU (SEQ ID NO: |
| | | UUUU (SEQ ID NO: 1379) | 1398) |
| crRNA: tracr | crRNA | GUUGUGAUUUGAUGUAGAA | GUUGUGGUUUGAUGUAGAA |
| RNA duplex | (Repeat) | (SEQ ID NO: 1380) | (SEQ ID NO: 1399) |
| V1 sequences | Partial | GUUGUGAUUUGAUGU (SEQ | GUUGUGGUUUGAUGU (SEQ ID |
| | crRNA 1 | ID NO: 1381) | NO: 1400) |
| | Partial | GUUGUGAUUUGA (SEQ ID | GUUGUGGUUUGA (SEQ ID NO: |
| | crRNA 2 | NO: 1382) | 1401) |
| | Partial | GUUGUGAUUU (SEQ ID NO: | GUUGUGGUUU (SEQ ID NO: 1402) |
| | crRNA 3 | 1383) | |
| | tracrRNA | AUCUACAUCUUAUCACAAU | UUCUACAUCUUAUCACAAU (SEQ |
| | (Antirepeat) | (SEQ ID NO: 1384) | ID NO: 1403) |
| | Partial | ACAUCUUAUCACAAU (SEQ | ACAUCUUAUCACAAU (SEQ ID |
| | tracrRNA 1 | ID NO: 1385) | NO: 1404) |
| | Partial | UCUUAUCACAAU (SEQ ID | UCUUAUCACAAU (SEQ ID NO: |
| | tracrRNA 2 | NO: 1386) | 1405) |
| | Partial | UUAUCACAAU (SEQ ID NO: | UUAUCACAAU (SEQ ID NO: 1406) |
| | tracrRNA 3 | 1387) | |
| tracrRNA V1 | tracrRNA | AAGGCUAUAUGCCGA (SEQ | AAGGCUAUAUGCCGA (SEQ ID |
| sequences | Portion 1 | ID NO: 1388) | NO: 1407) |
| | tracrRNA | AAGGCUAUAUGCC (SEQ ID | AAGGCUAUAUGCC (SEQ ID NO: |
| | Portion 1- | NO: 1389) | 1408) |
| | partial | | |
| | tracrRNA | AGGAUUUUAUCCUAU (SEQ | AGGAUUUAUAUCCUAU (SEQ ID |
| | Portion 2 | ID NO: 1390) | NO: 1409) |
| | tracrRNA | AGGAUUUUAUCCU (SEQ ID | AGGAUUUAUAUCCU (SEQ ID NO: |
| | Portion 2- | NO: 1391) | 1410) |
| | partial | | |
| | tracrRNA | AGUCCCGCGUACUCCGUGG | GUGCCCUCUUCGGAGGGCAUUA |
| | Portion 3 | GACUUUUUU (SEQ ID NO: | UUUUUUU (SEQ ID NO: 1411) |
| | | 1392) | |
| | tracrRNA | AGUCCCGCGUACUCCGUGG | GUGCCCUCUUCGGAGGGCAU |
| | Portion 3- | GACU (SEQ ID NO: 1393) | (SEQ ID NO: 1412) |
| | partial | | |
| | tracrRNA | AGUCCCGCGUACUCCGUGG | GUGCCCUCUUCGGAGGGCAUUA |
| | Portion 3- | GAC (SEQ ID NO: 1394) | (SEQ ID NO: 1413) |
| | without | | |
| | polyT | | |
| | sgRNA V2 | GUUGUGAUUUGAUGUAGAA | — |
| | sequence | gaaaAUCUACAUCUUAUCAC | |
| | | AAUAAGGCUAUAUGCCGAA | |
| | | GGAUUCUAUCCUAUAGUCC | |
| | | CGCGUACUCCGUGGGACUU | |
| | | UUUU (SEQ ID NO: 1395) | |
| tracrRNA V2 | tracrRNA | AGGAUUCUAUCCUAU (SEQ | — |
| sequences | Portion 2 | ID NO: 1396) | |
| | tracrRNA | AGGAUUCUAUCCU (SEQ ID | — |
| | Portion 2- | NO: 1397) | |
| | partial | | |
| | | OMNI-333 | OMNI-334 |
| | sgRNA V1 | GUUUUAGGUCUCGGACAgaa | GUUGUGAAAAGACACCgaaaGAG |
| | sequence | aUGUCCGAGGAUUCUAAGA | CCGUCUUUUCACAACAAGGCUA |
| | | UAAAGCUUUAUGCUGUGGG | UAUGCCGCAGUCGAAAUGACUC |
| | | GUUGCGUAUCCCCUUAUCG | UCCCCGCACGUACGCCGUGUGG |
| | | AACGUACUAGACGAGCUCC | GGAUUUUUU (SEQ ID NO: 1438) |
| | | GGCUCGUCUUUUUU (SEQ ID | |
| | | NO: 1414) | |
| crRNA: tracr | crRNA | GUUUUAGGUCUCGGACA | GUUGUGAAAAGACACC (SEQ ID |
| RNA duplex | (Repeat) | (SEQ ID NO: 1415) | NO: 1439) |
| V1 sequences | Partial | GUUUUAGGUCUCGGA (SEQ | GUUGUGAAAAGACAC (SEQ ID |
| | crRNA 1 | ID NO: 1416) | NO: 1440) |
| | Partial | GUUUUAGGUCUC (SEQ ID | GUUGUGAAAAGA (SEQ ID NO: |
| | crRNA 2 | NO: 1417) | 1441) |
| | Partial | GUUUUAGGUC (SEQ ID NO: | GUUGUGAAAA (SEQ ID NO: 1442) |
| | crRNA 3 | 1418) | |
| | tracrRNA | UGUCCGAGGAUUCUAAGAU | GAGCCGUCUUUUCACAAC (SEQ |
| | (Antirepeat) | (SEQ ID NO: 1419) | ID NO: 1443) |
| | Partial | UCCGAGGAUUCUAAGAU | GAGCCGUCUUUUCACAAC (SEQ |
| | tracrRNA 1 | (SEQ ID NO: 1420) | ID NO: 1444) |
| | Partial | GAGGAUUCUAAGAU (SEQ | UCUUUUCACAAC (SEQ ID NO: |
| | tracrRNA 2 | ID NO: 1421) | 1445) |
| | Partial | GGAUUCUAAGAU (SEQ ID | UUUUCACAAC (SEQ ID NO: 1446) |
| | tracrRNA 3 | NO: 1422) | |
| tracrRNA V1 | tracrRNA | AAAGCUUUAUGCUGU (SEQ | AAGGCUAUAUGCCGC (SEQ ID |
| sequences | Portion 1 | ID NO: 1423) | NO: 1447) |
| | tracrRNA | AAAGCUUUAUGCU (SEQ ID | AAGGCUAUAUGCC (SEQ ID NO: |
| | Portion 1- | NO: 1424) | 1448) |
| | partial | | |
| | tracrRNA | GGGGUUGCGUAUCCCCUUA | AGUCGAAAUGACUC (SEQ ID NO: |
| | Portion 2 | UCGAACGUACU (SEQ ID NO: | 1449) |
| | | 1425) | |
| | tracrRNA | GGGGUUGCGUAUCCCC (SEQ | AGUCGAAAUGACU (SEQ ID NO: |
| | Portion 2- | ID NO: 1426) | 1450) |
| | partial | | |
| | tracrRNA | AGACGAGCUCCGGCUCGUC | UCCCCGCACGUACGCCGUGUGG |
| | Portion 3 | UUUUUU (SEQ ID NO: 1427) | GGAUUUUUU (SEQ ID NO: 1451) |
| | tracrRNA | AGACGAGCUCCGGCUCGUC | UCCCCGCACGUACGCCGUGUGG |
| | Portion 3- | U (SEQ ID NO: 1428) | GGA (SEQ ID NO: 1452) |
| | partial | | |
| | tracrRNA | AGACGAGCUCCGGCUCGUC | UCCCCGCACGUACGCCGUGUGG |
| | Portion 3- | (SEQ ID NO: 1429) | GGA (SEQ ID NO: 1453) |
| | without | | |
| | polyT | | |
| | sgRNA V2 | GUCUUAGGUCUCGGACAgaa | GUUGUGAGAAGACACCgaaaGAG |
| | sequence | aUGUCCGAGGAUUCUAAGA | CCGUCUUCUCACAACAAGGCUA |
| | | UAAAGCUUUAUGCUGUGGG | UAUGCCGCAGUCGAAAUGACUC |
| | | GUUGCGUAUCCCCUUAUCG | UCCCCGCACGUACGCCGUGUGG |
| | | AACGUACUAGACGAGCUCC | GGAUUUUUU (SEQ ID NO: 1454) |
| | | GGCUCGUCUUUUUU (SEQ ID | |
| | | NO: 1430) | |
| crRNA: tracr | crRNA | GUCUUAGGUCUCGGACA | GUUGUGAGAAGACACC (SEQ ID |
| RNA duplex | (Repeat) | (SEQ ID NO: 1431) | NO: 1455) |
| V2 sequences | Partial | GUCUUAGGUCUCGGA (SEQ | GUUGUGAGAAGACAC (SEQ ID |
| | crRNA 1 | ID NO: 1432) | NO: 1456) |
| | Partial | GUCUUAGGUCUC (SEQ ID | GUUGUGAGAAGA (SEQ ID NO: |
| | crRNA 2 | NO: 1433) | 1457) |
| | Partial | GUCUUAGGUC (SEQ ID NO: | GUUGUGAGAA (SEQ ID NO: 1458) |
| | crRNA 3 | 1434) | |
| | tracrRNA | — | GAGCCGUCUUCUCACAAC (SEQ |
| | (Antirepeat) | | ID NO: 1459) |
| | Partial | — | GAGCCGUCUUCUCACAAC (SEQ |
| | tracrRNA 1 | | ID NO: 1460) |
| | Partial | — | UCUUCUCACAAC (SEQ ID NO: |
| | tracrRNA 2 | | 1461) |
| | Partial | — | UUCUCACAAC (SEQ ID NO: 1462) |
| | tracrRNA 3 | | |
| | sgRNA V3 | GUUUUAGGUCUCGGACAgaa | — |
| | sequence | aUGUCCGAGGAUUCUAAGA | |
| | | UAAAGCUUUAUGCUGUGGG | |
| | | GUUGCGUAUCCCCUUAUCU | |
| | | UUUUU (SEQ ID NO: 1435) | |
| tracrRNA V3 | tracrRNA | GGGGUUGCGUAUCCCCUUA | — |
| sequences | Portion 2 | UCUUUUUU (SEQ ID NO: | |
| | | 1436) | |
| | tracrRNA | GGGGUUGCGUAUCCCCUUA | — |
| | Portion 2- | UC (SEQ ID NO: 1437) | |
| | without | | |
| | polyT | | |
| | | OMNI-336 | OMNI-337 |
| | sgRNA V1 | GUUUUAGAUUUAUGUUgaaa | GUUUUAGAAGUAUGUUAUUgaaa |
| | sequence | AGCAUAAAUGAGUUAAAAU | AAUAGCAUAAUGAGUUAAAAUA |
| | | AAGGUAAAACCUUAAAUGC | AGGUUUUUAACCUAUAAUGCCA |
| | | CAAUUUAAUAUUGGUUUUG | AUUCAUUUGGUUUCGCUUAGGC |
| | | CUUAGGCAAGUAAAGUCUU | GAAAAAUGAGAGUUCUAAUUAU |
| | | AGUUAUCUAAGGCUUUUUU | UUAGGACUUUUAUUUUUUU |
| | | U (SEQ ID NO: 1463) | (SEQ ID NO: 1496) |
| crRNA: tracr | crRNA | GUUUUAGAUUUAUGUU | GUUUUAGAAGUAUGUUAUU |
| RNA duplex | (Repeat) | (SEQ ID NO: 1464) | (SEQ ID NO: 1497) |
| V1 sequences | Partial | GUUUUAGAUUUAUGU (SEQ | GUUUUAGAAGUAUGU (SEQ ID |
| | crRNA 1 | ID NO: 1465) | NO: 1498) |
| | Partial | GUUUUAGAUUUA (SEQ ID | GUUUUAGAAGUA (SEQ ID NO: |
| | crRNA 2 | NO: 1466) | 1499) |
| | Partial | GUUUUAGAUU (SEQ ID NO: | GUUUUAGAAG (SEQ ID NO: 1500) |
| | crRNA 3 | 1467) | |
| | tracrRNA | AGCAUAAAUGAGUUAAAAU | AAUAGCAUAAUGAGUUAAAAU |
| | (Antirepeat) | (SEQ ID NO: 1468) | (SEQ ID NO: 1501) |
| | Partial | AGCAUAAAUGAGUUAAAAU | GCAUAAUGAGUUAAAAU (SEQ ID |
| | tracrRNA 1 | (SEQ ID NO: 1469) | NO: 1502) |
| | Partial | UAAAUGAGUUAAAAU (SEQ | UAAUGAGUUAAAAU (SEQ ID NO: |
| | tracrRNA 2 | ID NO: 1470) | 1503) |
| | Partial | AAUGAGUUAAAAU (SEQ ID | AUGAGUUAAAAU (SEQ ID NO: |
| | tracrRNA 3 | NO: 1471) | 1504) |
| tracrRNA V1 | tracrRNA | AAGGUAAAACCUUAAAUGC | AAGGUUUUUAACCUAUAAU |
| sequences | Portion 1 | CAAUUUAAUAUUGGUUUUG | (SEQ ID NO: 1505) |
| | | CUUAGGCAAGU (SEQ ID NO: | |
| | | 1472) | |
| | tracrRNA | AAGGUAAAACCUUAAAUGC | AAGGUUUUUAACCU (SEQ ID NO: |
| | Portion 1- | CAAUUUAAUAUUGGUUUUG | 1506) |
| | partial | CUU (SEQ ID NO: 1473) | |
| | tracrRNA | AAAGUCUUAGUUAUCUAAG | GCCAAUUCAUUUGGU (SEQ ID |
| | Portion 2 | GCUUUUUUU (SEQ ID NO: | NO: 1507) |
| | | 1474) | |
| | tracrRNA | AAAGUCUUAGUUAUCUAAG | GCCAAUUCAUUUGGU (SEQ ID |
| | Portion 2- | GCUUU (SEQ ID NO: 1475) | NO: 1508) |
| | partial | | |
| | tracrRNA | AAAGUCUUAGUUAUCUAAG | — |
| | Portion 2- | GC (SEQ ID NO: 1476) | |
| | without | | |
| | polyT | | |
| | tracrRNA | — | UUCGCUUAGGCGAA (SEQ ID NO: |
| | Portion 3 | | 1509) |
| | tracrRNA | — | UUCGCUUAGGCGAA (SEQ ID NO: |
| | Portion 3- | | 1510) |
| | partial | | |
| | tracrRNA | — | AAAUGAGAGUUCUAAUUAUUUA |
| | Portion 4 | | GGACUUUUAUUUUUUU (SEQ ID |
| | | | NO: 1511) |
| | tracrRNA | — | AAAUGAGAGUUCUAAUUAUUUA |
| | Portion 4- | | GGACUUUUAUUU (SEQ ID NO: |
| | partial | | 1512) |
| | tracrRNA | — | AAAUGAGAGUUCUAAUUAUUUA |
| | Portion 4- | | GGACUUUUA (SEQ ID NO: 1513) |
| | without | | |
| | polyT | | |
| | sgRNA V2 | GUUCUAGAUUUAUGUUgaaa | GUUCUAGAAGUAUGUUAUUgaaa |
| | sequence | AGCAUAAAUGAGUUAGAAU | AAUAGCAUAAUGAGUUAGAAUA |
| | | AAGGUAGAACCUUAAAUGC | AGGUUUCUAACCUAUAAUGCCA |
| | | CAAUUUAAUAUUGGUUCUG | AUUCAUUUGGUUUCGCUUAGGC |
| | | CUUAGGCAAGUAAAGUCUU | GAAAAAUGAGAGUUCUAAUUAU |
| | | AGUUAUCUAAGGCUUUUUU | UUAGGACUCUUAUUUUUUU |
| | | U (SEQ ID NO: 1477) | (SEQ ID NO: 1514) |
| crRNA: tracr | crRNA | GUUCUAGAUUUAUGUU | GUUCUAGAAGUAUGUUAUU |
| RNA duplex | (Repeat) | (SEQ ID NO: 1478) | (SEQ ID NO: 1515) |
| V2 sequences | Partial | GUUCUAGAUUUAUGU (SEQ | GUUCUAGAAGUAUGU (SEQ ID |
| | crRNA 1 | ID NO: 1479) | NO: 1516) |
| | Partial | GUUCUAGAUUUA (SEQ ID | GUUCUAGAAGUA (SEQ ID NO: |
| | crRNA 2 | NO: 1480) | 1517) |
| | Partial | GUUCUAGAUU (SEQ ID NO: | GUUCUAGAAG (SEQ ID NO: 1518) |
| | crRNA 3 | 1481) | |
| | tracrRNA | AGCAUAAAUGAGUUAGAAU | AAUAGCAUAAUGAGUUAGAAU |
| | (Antirepeat) | (SEQ ID NO: 1482) | (SEQ ID NO: 1519) |
| | Partial | AGCAUAAAUGAGUUAGAAU | GCAUAAUGAGUUAGAAU (SEQ ID |
| | tracrRNA 1 | (SEQ ID NO: 1483) | NO: 1520) |
| | Partial | UAAAUGAGUUAGAAU (SEQ | UAAUGAGUUAGAAU (SEQ ID NO: |
| | tracrRNA 2 | ID NO: 1484) | 1521) |
| | Partial | AAUGAGUUAGAAU (SEQ ID | AUGAGUUAGAAU (SEQ ID NO: |
| | tracrRNA 3 | NO: 1485) | 1522) |
| tracrRNA V2 | tracrRNA | AAGGUAGAACCUUAAAUGC | AAGGUUUCUAACCUAUAAU |
| sequences | Portion 1 | CAAUUUAAUAUUGGUUCUG | (SEQ ID NO: 1523) |
| | | CUUAGGCAAGU (SEQ ID NO: | |
| | | 1486) | |
| | tracrRNA | AAGGUAGAACCUUAAAUGC | AAGGUUUCUAACCU (SEQ ID NO: |
| | Portion 1- | CAAUUUAAUAUUGGUUCUG | 1524) |
| | partial | CUU (SEQ ID NO: 1487) | |
| | tracrRNA | AAAGUCUUAGUUAUCUAAG | — |
| | Portion 2 | GCUUUUUUU (SEQ ID NO: | |
| | | 1488) | |
| | tracrRNA | AAAGUCUUAGUUAUCUAAG | — |
| | Portion 2- | GCUUU (SEQ ID NO: 1489) | |
| | partial | | |
| | tracrRNA | AAAGUCUUAGUUAUCUAAG | — |
| | Portion 2- | GC (SEQ ID NO: 1490) | |
| | without | | |
| | polyT | | |
| | tracrRNA | — | AAAUGAGAGUUCUAAUUAUUUA |
| | Portion 4 | | GGACUCUUAUUUUUUU (SEQ ID |
| | | | NO: 1525) |
| | tracrRNA | — | AAAUGAGAGUUCUAAUUAUUUA |
| | Portion 4- | | GGACUCUUAUUU (SEQ ID NO: |
| | partial | | 1526) |
| | tracrRNA | — | AAAUGAGAGUUCUAAUUAUUUA |
| | Portion 4- | | GGACUCUUA (SEQ ID NO: 1527) |
| | without | | |
| | polyT | | |
| | sgRNA V3 | GUUUUAGAUUUAUGUUgaaa | GUUUUAGAAGUAUGUUAUUgaaa |
| | sequence | AGCAUAAAUGAGUUAAAAU | AAUAGCAUAAUGAGUUAAAAUA |
| | | AAGGUAAAACCUUAAAUGC | AGGUUUUUAACCUAUAAUGCCA |
| | | CAAUUUAAUAUUGGUUUUG | AUUCAUUUGGUUUCGCUUAGGC |
| | | CUUAGGCAAGUAAAGUCUU | GAAAAAUGAGAGUUCUAAUUAU |
| | | AGUUAUCUAAGGCUUUUUU | UUAGGACUUUUUU (SEQ ID NO: |
| | | UAUUUUUU (SEQ ID NO: | 1528) |
| | | 1491) | |
| tracrRNA V3 | tracrRNA | AAGGUAAAACCUUAAAUGC | — |
| sequences | Portion 1 | CAAUUUAAUAUUGGUUUUG | |
| | | CUUAGGC (SEQ ID NO: 1492) | |
| | tracrRNA | AAGUAAAGUCUUAGUUAUC | — |
| | Portion 2 | UAAGGCUUUUUUUAUUUUU | |
| | | U (SEQ ID NO: 1493) | |
| | tracrRNA | AAGUAAAGUCUUAGUUAUC | — |
| | Portion 2- | UAAGGCUUUUUUU (SEQ ID | |
| | partial | NO: 1494) | |
| | tracrRNA | AAGUAAAGUCUUAGUUAUC | — |
| | Portion 2- | UAAGGCUUUUUUUA (SEQ | |
| | without | ID NO: 1495) | |
| | polyT | | |
| | tracrRNA | — | UUCGCUUAGGCGAAAAAU (SEQ |
| | Portion 3 | | ID NO: 1529) |
| | tracrRNA | — | GAGAGUUCUAAUUAUUUAGGAC |
| | Portion 4 | | UUUUUU (SEQ ID NO: 1530) |
| | tracrRNA | — | GAGAGUUCUAAUUAUUUAGGAC |
| | Portion 4- | | UUUU (SEQ ID NO: 1531) |
| | partial | | |
| | tracrRNA | — | GAGAGUUCUAAUUAUUUAGGAC |
| | Portion 4- | | (SEQ ID NO: 1532) |
| | without | | |
| | polyT | | |
| | sgRNA V4 | — | GUUCUAGAAGUAUGUUAUUgaaa |
| | sequence | | AAUAGCAUAAUGAGUUAGAAUA |
| | | | AGGUUUCUAACCUAUAAUGCCA |
| | | | AUUCAUUUGGUUUCGCUUAGGC |
| | | | GAAAAAUGAGAGUUCUAAUUAU |
| | | | UUAGGACUUUUUU (SEQ ID NO: |
| | | | 1533) |
| | | OMNI-338 | OMNI-339 |
| | sgRNA V1 | GUUUGAGAGUAGUGUAAgaa | GUUUGAGAGUAGUGUAAgaaaUU |
| | sequence | aUUACACUACAAGUUCAAA | ACACUACAAGUUCAAAUAAGCU |
| | | UAAAAAUUUAUUCAACCCG | UAUAGCGAAAUCAUCGCAUUGC |
| | | UCGCUUUGCGACCUCACAG | GAACUCACAGUGGGUGAGCGAA |
| | | UGUGUGAGUUACGACCUGC | AAAGACUCCUUCGGGAGUCUUU |
| | | UUUUAAGUAGGUCUUUUUU | UUU (SEQ ID NO: 1557) |
| | | (SEQ ID NO: 1534) | |
| crRNA: tracr | crRNA | GUUUGAGAGUAGUGUAA | GUUUGAGAGUAGUGUAA (SEQ |
| RNA duplex | (Repeat) | (SEQ ID NO: 1535) | ID NO: 1558) |
| V1 sequences | Partial | GUUUGAGAGUAGUGU (SEQ | GUUUGAGAGUAGUGU (SEQ ID |
| | crRNA 1 | ID NO: 1536) | NO: 1559) |
| | Partial | GUUUGAGAGUAG (SEQ ID | GUUUGAGAGUAG (SEQ ID NO: |
| | crRNA 2 | NO: 1537) | 1560) |
| | Partial | GUUUGAGAGU (SEQ ID NO: | GUUUGAGAGU (SEQ ID NO: 1561) |
| | crRNA 3 | 1538) | |
| | tracrRNA | UUACACUACAAGUUCAAAU | UUACACUACAAGUUCAAAU (SEQ |
| | (Antirepeat) | (SEQ ID NO: 1539) | ID NO: 1562) |
| | Partial | ACACUACAAGUUCAAAU | ACACUACAAGUUCAAAU (SEQ ID |
| | tracrRNA 1 | (SEQ ID NO: 1540) | NO: 1563) |
| | Partial | CUACAAGUUCAAAU (SEQ ID | CUACAAGUUCAAAU (SEQ ID NO: |
| | tracrRNA 2 | NO: 1541) | 1564) |
| | Partial | ACAAGUUCAAAU (SEQ ID | ACAAGUUCAAAU (SEQ ID NO: |
| | tracrRNA 3 | NO: 1542) | 1565) |
| tracrRNA V1 | tracrRNA | AAAAAUUUAUUCAACCCGU | AAGCUUAUAGCGAAAUCAUCGC |
| sequences | Portion 1 | CGCUUUGCGAC (SEQ ID NO: | AUU (SEQ ID NO: 1566) |
| | | 1543) | |
| | tracrRNA | AAAAAUUUAUUCAACCCGU | AAGCUUAUAGCGAAAUCAUCGC |
| | Portion 1- | CGCUUUGCGAC (SEQ ID NO: | (SEQ ID NO: 1567) |
| | partial | 1544) | |
| | tracrRNA | CUCACAGUGUGUGAGUUAC | GCGAACUCACAGUGGGUGAGC |
| | Portion 2 | (SEQ ID NO: 1545) | (SEQ ID NO: 1568) |
| | tracrRNA | CUCACAGUGUGUGAG (SEQ | GCGAACUCACAGUGGGUGAGC |
| | Portion 2- | ID NO: 1546) | (SEQ ID NO: 1569) |
| | partial | | |
| | tracrRNA | GACCUGCUUUUAAGUAGGU | GAAAAAGACUCCUUCGGGAGUC |
| | Portion 3 | CUUUUUU (SEQ ID NO: 1547) | UUUUUU (SEQ ID NO: 1570) |
| | tracrRNA | GACCUGCUUUUAAGUAGGU | GAAAAAGACUCCUUCGGGAGUC |
| | Portion 3- | C (SEQ ID NO: 1548) | UUUUUU (SEQ ID NO: 1571) |
| | partial | | |
| | tracrRNA | GACCUGCUUUUAAGUAGGU | GAAAAAGACUCCUUCGGGAGUC |
| | Portion 3- | C (SEQ ID NO: 1549) | (SEQ ID NO: 1572) |
| | without | | |
| | polyT | | |
| | sgRNA V2 | GUUUGAGAGUAGUGUAAgaa | — |
| | sequence | aUUACACUACAAGUUCAAA | |
| | | UAAAAAUUUAUUCAACCCG | |
| | | UCGCUUUGCGACCUCACAG | |
| | | UGUGUGAGUUACGACCUGC | |
| | | UUUCAAGUAGGUCUUUUUU | |
| | | (SEQ ID NO: 1550) | |
| tracrRNA V2 | tracrRNA | GACCUGCUUUCAAGUAGGU | — |
| sequences | Portion 3 | CUUUUUU (SEQ ID NO: 1551) | |
| | tracrRNA | GACCUGCUUUCAAGUAGGU | — |
| | Portion 3- | C (SEQ ID NO: 1552) | |
| | partial | | |
| | tracrRNA | GACCUGCUUUCAAGUAGGU | — |
| | Portion 3- | C (SEQ ID NO: 1553) | |
| | without | | |
| | polyT | | |
| | sgRNA V3 | GUUUGAGAGUAGUGUAAgaa | — |
| | sequence | aUUACACUACAAGUUCAAA | |
| | | UAAAAAUUUAUUCAACCCG | |
| | | UCGCUUUGCGACCUCACAG | |
| | | UGUGUGAGUUACGACCUGC | |
| | | UUUUUU (SEQ ID NO: 1554) | |
| tracrRNA V3 | tracrRNA | CUCACAGUGUGUGAGUUAC | — |
| sequences | Portion 2 | GACCUGCUUUUUU (SEQ ID | |
| | | NO: 1555) | |
| | tracrRNA | CUCACAGUGUGUGAGUUAC | — |
| | Portion 2- | GACCUGC (SEQ ID NO: 1556) | |
| | without | | |
| | polyT | | |
| | | OMNI-340 | OMNI-341 |
| | sgRNA V1 | GUUUUAGGUCUAUGUAAgaa | GUUUGAGAGUAGUGUAgaaaUAC |
| | sequence | aUUACAUAGCAGUUAAAAU | ACUACUAAGUUCAAAUAAGCUU |
| | | AAAUGUUAAACAAAAAGCC | UUAGCGAAAUCAUCGUUUAACG |
| | | UUUUUAAUAAGGUGUUGCG | AAUUCACAGUGUGUGAACCUUU |
| | | UUGGCAACGAAUUUAGAGG | UUU (SEQ ID NO: 1618) |
| | | ACCUUUUCGGUUCUCUUUU | |
| | | UUUGUUGUAAAAGCUUUGU | |
| | | AGAAAUGCUUUGCAUUUUU | |
| | | GCGGUAUUGCCCAUGCAAA | |
| | | CUUUUUU (SEQ ID NO: 1573) | |
| crRNA: tracr | crRNA | GUUUUAGGUCUAUGUAA | GUUUGAGAGUAGUGUA (SEQ ID |
| RNA duplex | (Repeat) | (SEQ ID NO: 1574) | NO: 1619) |
| V1 sequences | Partial | GUUUUAGGUCUAUGU (SEQ | GUUUGAGAGUAGUGU (SEQ ID |
| | crRNA 1 | ID NO: 1575) | NO: 1620) |
| | Partial | GUUUUAGGUCUA (SEQ ID | GUUUGAGAGUAG (SEQ ID NO: |
| | crRNA 2 | NO: 1576) | 1621) |
| | Partial | GUUUUAGGUC (SEQ ID NO: | GUUUGAGAGU (SEQ ID NO: 1622) |
| | crRNA 3 | 1577) | |
| | tracrRNA | UUACAUAGCAGUUAAAAU | UACACUACUAAGUUCAAAU (SEQ |
| | (Antirepeat) | (SEQ ID NO: 1578) | ID NO: 1623) |
| | Partial | ACAUAGCAGUUAAAAU | ACACUACUAAGUUCAAAU (SEQ |
| | tracrRNA 1 | (SEQ ID NO: 1579) | ID NO: 1624) |
| | Partial | UAGCAGUUAAAAU (SEQ ID | CUACUAAGUUCAAAU (SEQ ID |
| | tracrRNA 2 | NO: 1580) | NO: 1625) |
| | Partial | GCAGUUAAAAU (SEQ ID NO: | ACUAAGUUCAAAU (SEQ ID NO: |
| | tracrRNA 3 | 1581) | 1626) |
| tracrRNA V1 | tracrRNA | AAAUGUUAAACAAAAAGCC | AAGCUUUUAGCGAAAUCAUCGU |
| sequences | Portion 1 | UUUUUAAUAAGGUGUU | UUAACGAA (SEQ ID NO: 1627) |
| | | (SEQ ID NO: 1582) | |
| | tracrRNA | AAAUGUUAAACAAAAAGCC | AAGCUUUUAGCGAAAUCAUCGU |
| | Portion 1- | UUUUUAAUAAGGU (SEQ ID | U (SEQ ID NO: 1628) |
| | partial | NO: 1583) | |
| | tracrRNA | GCGUUGGCAACGAAUUUAG | UUCACAGUGUGUGAACCUUUUU |
| | Portion 2 | AGGACCUUUUCGGUUCUCU | U (SEQ ID NO: 1629) |
| | | UUUUUUGUUGUAAAAGCUU | |
| | | U (SEQ ID NO: 1584) | |
| | tracrRNA | GCGUUGGCAACGAAUUUAG | UUCACAGUGUGUGAA (SEQ ID |
| | Portion 2- | AGGACCUUUUCGGUUCUCU | NO: 1630) |
| | partial | UUUUUUGUUGUAAAAGC | |
| | | (SEQ ID NO: 1585) | |
| | tracrRNA | — | UUCACAGUGUGUGAACC (SEQ ID |
| | Portion 2- | | NO: 1631) |
| | without | | |
| | polyT | | |
| | tracrRNA | GUAGAAAUGCUUUGCAUUU | — |
| | Portion 3 | UUGC (SEQ ID NO: 1586) | |
| | tracrRNA | GUAGAAAUGCUUUGCAUUU | — |
| | Portion 3- | UUGC (SEQ ID NO: 1587) | |
| | partial | | |
| | tracrRNA | GGUAUUGCCCAUGCAAACU | — |
| | Portion 4 | UUUUU (SEQ ID NO: 1588) | |
| | tracrRNA | GGUAUUGCCCAUGCAAACU | — |
| | Portion 4- | (SEQ ID NO: 1589) | |
| | partial | | |
| | tracrRNA | GGUAUUGCCCAUGCAAAC | — |
| | Portion 4- | (SEQ ID NO: 1590) | |
| | without | | |
| | polyT | | |
| | sgRNA V2 | GUUCUAGGUCUAUGUAAgaa | GUUUGAGAGUAGUGUAgaaaUAC |
| | sequence | aUUACAUAGCAGUUAGAAU | ACUACUAAGUUCAAAUAAGCUU |
| | | AAAUGUUAAACAAAAAGCC | CUAGCGAAAUCAUCGUUUAACG |
| | | UUUCUAAUAAGGUGUUGCG | AAUUCACAGUGUGUGAACCUUU |
| | | UUGGCAACGAAUUUAGAGG | UUU (SEQ ID NO: 1632) |
| | | ACCUUCUCGGUUCUCUUUC | |
| | | UUUGUUGUAAAAGCUUUGU | |
| | | AGAAAUGCUUUGCAUUUCU | |
| | | GCGGUAUUGCCCAUGCAAA | |
| | | CUUUUUU (SEQ ID NO: 1591) | |
| crRNA: tracr | crRNA | GUUCUAGGUCUAUGUAA | — |
| RNA duplex | (Repeat) | (SEQ ID NO: 1592) | |
| V2 sequences | Partial | GUUCUAGGUCUAUGU (SEQ | — |
| | crRNA 1 | ID NO: 1593) | |
| | Partial | GUUCUAGGUCUA (SEQ ID | — |
| | crRNA 2 | NO: 1594) | |
| | Partial | GUUCUAGGUC (SEQ ID NO: | — |
| | crRNA 3 | 1595) | |
| | tracrRNA | UUACAUAGCAGUUAGAAU | — |
| | (Antirepeat) | (SEQ ID NO: 1596) | |
| | Partial | ACAUAGCAGUUAGAAU | — |
| | tracrRNA 1 | (SEQ ID NO: 1597) | |
| | Partial | UAGCAGUUAGAAU (SEQ ID | — |
| | tracrRNA 2 | NO: 1598) | |
| | Partial | GCAGUUAGAAU (SEQ ID NO: | — |
| | tracrRNA 3 | 1599) | |
| tracrRNA V2 | tracrRNA | AAAUGUUAAACAAAAAGCC | AAGCUUCUAGCGAAAUCAUCGU |
| sequences | Portion 1 | UUUCUAAUAAGGUGUU | UUAACGAA (SEQ ID NO: 1633) |
| | | (SEQ ID NO: 1600) | |
| | tracrRNA | AAAUGUUAAACAAAAAGCC | AAGCUUCUAGCGAAAUCAUCGU |
| | Portion 1- | UUUCUAAUAAGGU (SEQ ID | U (SEQ ID NO: 1634) |
| | partial | NO: 1601) | |
| | tracrRNA | GCGUUGGCAACGAAUUUAG | — |
| | Portion 2 | AGGACCUUCUCGGUUCUCU | |
| | | UUCUUUGUUGUAAAAGCUU | |
| | | U (SEQ ID NO: 1602) | |
| | tracrRNA | GCGUUGGCAACGAAUUUAG | — |
| | Portion 2- | AGGACCUUCUCGGUUCUCU | |
| | partial | UUCUUUGUUGUAAAAGC | |
| | | (SEQ ID NO: 1603) | |
| | tracrRNA | GUAGAAAUGCUUUGCAUUU | — |
| | Portion 3 | CUGC (SEQ ID NO: 1604) | |
| | tracrRNA | GUAGAAAUGCUUUGCAUUU | — |
| | Portion 3- | CUGC (SEQ ID NO: 1605) | |
| | partial | | |
| | sgRNA V3 | GUUUUAGGUCUAUGUAAgaa | — |
| | sequence | aUUACAUAGCAGUUAAAAU | |
| | | AAAUGUUAAACAAAAAGCC | |
| | | UUUUUAAUAAGGUGUUGCG | |
| | | UUGGCAACGAAUUUAGAGG | |
| | | ACCUUUUCGGUUCUCUUUU | |
| | | UUU (SEQ ID NO: 1606) | |
| tracrRNA V3 | tracrRNA | AAAUGUUAAACAAAAAGCC | — |
| sequences | Portion 1 | UUUUUAAUAAGGU (SEQ ID | |
| | | NO: 1607) | |
| | tracrRNA | GUUGCGUUGGCAACGAAUU | — |
| | Portion 2 | U (SEQ ID NO: 1608) | |
| | tracrRNA | GUUGCGUUGGCAAC (SEQ ID | — |
| | Portion 2- | NO: 1609) | |
| | partial | | |
| | tracrRNA | AGAGGACCUUUUCGGUUCU | — |
| | Portion 3 | CUUUUUUU (SEQ ID NO: | |
| | | 1610) | |
| | tracrRNA | AGAGGACCUUUUCGGUUCU | — |
| | Portion 3- | CU (SEQ ID NO: 1611) | |
| | partial | | |
| | tracrRNA | AGAGGACCUUUUCGGUUCU | — |
| | Portion 3- | C (SEQ ID NO: 1612) | |
| | without | | |
| | polyT | | |
| | sgRNA V4 | GUUCUAGGUCUAUGUAAgaa | — |
| | sequence | aUUACAUAGCAGUUAGAAU | |
| | | AAAUGUUAAACAAAAAGCC | |
| | | UUUCUAAUAAGGUGUUGCG | |
| | | UUGGCAACGAAUUUAGAGG | |
| | | ACCUUCUCGGUUCUCUUUU | |
| | | UUU (SEQ ID NO: 1613) | |
| tracrRNA V4 | tracrRNA | AAAUGUUAAACAAAAAGCC | — |
| sequences | Portion 1 | UUUCUAAUAAGGU (SEQ ID | |
| | | NO: 1614) | |
| | tracrRNA | AGAGGACCUUCUCGGUUCU | — |
| | Portion 3 | CUUUUUUU (SEQ ID NO: | |
| | | 1615) | |
| | tracrRNA | AGAGGACCUUCUCGGUUCU | — |
| | Portion 3- | CU (SEQ ID NO: 1616) | |
| | partial | | |
| | tracrRNA | AGAGGACCUUCUCGGUUCU | — |
| | Portion 3- | C (SEQ ID NO: 1617) | |
| | without | | |
| | polyT | | |
| | tracrRNA | — | — |
| | Portion 4 | | |
| | tracrRNA | — | — |
| | Portion 4- | | |
| | partial | | |
| | tracrRNA | — | — |
| | Portion 4- | | |
| | without | | |
| | polyT | | |
| | | OMNI-342 | OMNI-343 |
| | sgRNA V1 | GUUUGAGAGUAGUGUAAgaa | GUUUGAGUAUGGUGUAAgaaaUU |
| | sequence | aUUACACUAUGCGUUCAAA | ACACCAUUAGUUCAAAUAAGAU |
| | | UAACGAUUUAUCGAAACCG | UUUUUCAAACCGCCGUUAUUCG |
| | | CUGCUUUGCAGCAUCACAG | GUCGCACACGCUGUGUGCAAUA |
| | | UGUGUGAUUAAAGACCUGU | GGAACUGUUGCGUUGCAGCAGU |
| | | UCACCAGGUCUUUUUU | UCUUUUUU (SEQ ID NO: 1656) |
| | | (SEQ ID NO: 1635) | |
| | crRNA | GUUUGAGAGUAGUGUAA | GUUUGAGUAUGGUGUAA (SEQ |
| | (Repeat) | (SEQ ID NO: 1636) | ID NO: 1657) |
| crRNA: tracr | Partial | GUUUGAGAGUAGUGU (SEQ | GUUUGAGUAUGGUGU (SEQ ID |
| RNA duplex | crRNA 1 | ID NO: 1637) | NO: 1658) |
| V1 sequences | Partial | GUUUGAGAGUAG (SEQ ID | GUUUGAGUAUGG (SEQ ID NO: |
| | crRNA 2 | NO: 1638) | 1659) |
| | Partial | GUUUGAGAGU (SEQ ID NO: | GUUUGAGUAU (SEQ ID NO: 1660) |
| | crRNA 3 | 1639) | |
| | tracrRNA | UUACACUAUGCGUUCAAAU | UUACACCAUUAGUUCAAAU (SEQ |
| | (Antirepeat) | (SEQ ID NO: 1640) | ID NO: 1661) |
| | Partial | ACACUAUGCGUUCAAAU | ACACCAUUAGUUCAAAU (SEQ ID |
| | tracrRNA 1 | (SEQ ID NO: 1641) | NO: 1662) |
| | Partial | CUAUGCGUUCAAAU (SEQ ID | CCAUUAGUUCAAAU (SEQ ID NO: |
| | tracrRNA 2 | NO: 1642) | 1663) |
| | Partial | AUGCGUUCAAAU (SEQ ID | AUUAGUUCAAAU (SEQ ID NO: |
| | tracrRNA 3 | NO: 1643) | 1664) |
| tracrRNA V1 | tracrRNA | AACGAUUUAUCGAAACC | AAGAUUUUUUCAAACCGCCGUU |
| sequences | Portion 1 | (SEQ ID NO: 1644) | AUUCGGUC (SEQ ID NO: 1665) |
| | tracrRNA | AACGAUUUAUCG (SEQ ID | AAGAUUUUUUCAAACCGCCGUU |
| | Portion 1- | NO: 1645) | AUUCGGU (SEQ ID NO: 1666) |
| | partial | | |
| | tracrRNA | GCUGCUUUGCAGC (SEQ ID | GCACACGCUGUGUGCAAU (SEQ |
| | Portion 2 | NO: 1646) | ID NO: 1667) |
| | tracrRNA | GCUGCUUUGCAGC (SEQ ID | GCACACGCUGUGUGC (SEQ ID |
| | Portion 2- | NO: 1647) | NO: 1668) |
| | partial | | |
| | tracrRNA | AUCACAGUGUGUGAUU | AGGAACUGUUGCGUUGCAGCAG |
| | Portion 3 | (SEQ ID NO: 1648) | UUCUUUUUU (SEQ ID NO: 1669) |
| | tracrRNA | AUCACAGUGUGUGAU (SEQ | AGGAACUGUUGCGUUGCAGCAG |
| | Portion 3- | ID NO: 1649) | UUCUU (SEQ ID NO: 1670) |
| | partial | | |
| | tracrRNA | — | AGGAACUGUUGCGUUGCAGCAG |
| | Portion 3- | | UUC (SEQ ID NO: 1671) |
| | without | | |
| | polyT | | |
| | tracrRNA | AAAGACCUGUUCACCAGGU | — |
| | Portion 4 | CUUUUUU (SEQ ID NO: 1650) | |
| | tracrRNA | AAAGACCUGUUCACCAGGU | — |
| | Portion 4- | CUUU (SEQ ID NO: 1651) | |
| | partial | | |
| | tracrRNA | AAAGACCUGUUCACCAGGU | — |
| | Portion 4- | C (SEQ ID NO: 1652) | |
| | without | | |
| | polyT | | |
| | sgRNA V2 | | GUUUGAGUAUGGUGUAAgaaaUU |
| | sequence | | ACACCAUUAGUUCAAAUAAGAU |
| | | | UCUUUCAAACCGCCGUUAUUCG |
| | | | GUCGCACACGCUGUGUGCAAUA |
| | | | GGAACUGUUGCGUUGCAGCAGU |
| | | | UCUUUUUU (SEQ ID NO: 1672) |
| tracrRNA V2 | tracrRNA | — | AAGAUUCUUUCAAACCGCCGUU |
| sequences | Portion 1 | | AUUCGGUC (SEQ ID NO: 1673) |
| | tracrRNA | — | AAGAUUCUUUCAAACCGCCGUU |
| | Portion 1- | | AUUCGGU (SEQ ID NO: 1674) |
| | partial | | |
| | sgRNA V3 | GUUUGAGAGUAGUGUAAgaa | — |
| | sequence | aUUACACUAUGCGUUCAAA | |
| | | UAACGAUUUAUCGAAACCG | |
| | | CUGCUUUGCAGCAUCACAG | |
| | | UGUGUGAUUUUUU (SEQ ID | |
| | | NO: 1653) | |
| tracrRNA V3 | tracrRNA | AUCACAGUGUGUGAUUUUU | — |
| sequences | Portion 3 | U (SEQ ID NO: 1654) | |
| | tracrRNA | AUCACAGUGUGUGA (SEQ | |
| | Portion 3- | ID NO: 1655) | |
| | without | | |
| | polyT | | |
| | | OMNI-344 | OMNI-345 |
| | sgRNA V1 | GUUUGAGAGUAGUGUUAgaa | GUUUGAGAGUAGUGUAAgaaaUU |
| | sequence | aUAACACUACAAGUUCAAA | ACACUACAAGUUCAAAUAAGCU |
| | | UAAGCUUCGUAGCGAAUCG | UUUAGCGAAAACAUCGCCUUCG |
| | | AUCGCCUUUGGCGAACUCA | GCGAAUUCACAGUGUGUGAACU |
| | | CAGUGUGUGAGACAGCAGA | AACAGACUCUUUCAAGGGUCUG |
| | | CCCCGAAAGGGGUCUGUUU | UUUUUU (SEQ ID NO: 1702) |
| | | UUU (SEQ ID NO: 1675) | |
| crRNA: tracr | crRNA | GUUUGAGAGUAGUGUUA | GUUUGAGAGUAGUGUAA (SEQ |
| RNA duplex | (Repeat) | (SEQ ID NO: 1676) | ID NO: 1703) |
| V1 sequences | Partial | GUUUGAGAGUAGUGU (SEQ | GUUUGAGAGUAGUGU (SEQ ID |
| | crRNA 1 | ID NO: 1677) | NO: 1704) |
| | Partial | GUUUGAGAGUAG (SEQ ID | GUUUGAGAGUAG (SEQ ID NO: |
| | crRNA 2 | NO: 1678) | 1705) |
| | Partial | GUUUGAGAGU (SEQ ID NO: | GUUUGAGAGU (SEQ ID NO: 1706) |
| | crRNA 3 | 1679) | |
| | tracrRNA | UAACACUACAAGUUCAAAU | UUACACUACAAGUUCAAAU (SEQ |
| | (Antirepeat) | (SEQ ID NO: 1680) | ID NO: 1707) |
| | Partial | ACACUACAAGUUCAAAU | ACACUACAAGUUCAAAU (SEQ ID |
| | tracrRNA 1 | (SEQ ID NO: 1681) | NO: 1708) |
| | Partial | CUACAAGUUCAAAU (SEQ ID | CUACAAGUUCAAAU (SEQ ID NO: |
| | tracrRNA 2 | NO: 1682) | 1709) |
| | Partial | ACAAGUUCAAAU (SEQ ID | ACAAGUUCAAAU (SEQ ID NO: |
| | tracrRNA 3 | NO: 1683) | 1710) |
| tracrRNA V1 | tracrRNA | AAGCUUCGUAGCGAAUCGA | AAGCUUUUAGCGAAAACA (SEQ |
| sequences | Portion 1 | (SEQ ID NO: 1684) | ID NO: 1711) |
| | tracrRNA | AAGCUUCGUAGC (SEQ ID | AAGCUUUUAGC (SEQ ID NO: |
| | Portion 1- | NO: 1685) | 1712) |
| | partial | | |
| | tracrRNA | UCGCCUUUGGCGAA (SEQ ID | UCGCCUUCGGCGAA (SEQ ID NO: |
| | Portion 2 | NO: 1686) | 1713) |
| | tracrRNA | UCGCCUUUGGCGA (SEQ ID | UCGCCUUCGGCGA (SEQ ID NO: |
| | Portion 2- | NO: 1687) | 1714) |
| | partial | | |
| | tracrRNA | CUCACAGUGUGUGAGAC | UUCACAGUGUGUGAACU (SEQ ID |
| | Portion 3 | (SEQ ID NO: 1688) | NO: 1715) |
| | tracrRNA | CUCACAGUGUGUGAG (SEQ | UUCACAGUGUGUGAA (SEQ ID |
| | Portion 3- | ID NO: 1689) | NO: 1716) |
| | partial | | |
| | tracrRNA | AGCAGACCCCGAAAGGGGU | AACAGACUCUUUCAAGGGUCUG |
| | Portion 4 | CUGUUUUUU (SEQ ID NO: | UUUUUU (SEQ ID NO: 1717) |
| | | 1690) | |
| | tracrRNA | AGCAGACCCCGAAAGGGGU | AACAGACUCUUUCAAGGGUCUG |
| | Portion 4- | CUGUU (SEQ ID NO: 1691) | UU (SEQ ID NO: 1718) |
| | partial | | |
| | tracrRNA | AGCAGACCCCGAAAGGGGU | AACAGACUCUUUCAAGGGUCUG |
| | Portion 4- | CUG (SEQ ID NO: 1692) | (SEQ ID NO: 1719) |
| | without | | |
| | polyT | | |
| | sgRNA V2 | — | GUUUGAGAGUAGUGUAAgaaaUU |
| | sequence | | ACACUACAAGUUCAAAUAAGCU |
| | | | UCUAGCGAAAACAUCGCCUUCG |
| | | | GCGAAUUCACAGUGUGUGAACU |
| | | | AACAGACUCUUUCAAGGGUCUG |
| | | | UUUUUU (SEQ ID NO: 1720) |
| tracrRNA V2 | tracrRNA | — | AAGCUUCUAGCGAAAACA (SEQ |
| sequences | Portion 1 | | ID NO: 1721) |
| | tracrRNA | — | AAGCUUCUAGC (SEQ ID NO: |
| | Portion 1- | | 1722) |
| | partial | | |
| | sgRNA V3 | GUUUGAGAGUAGUGUUAgaa | GUUUGAGAGUAGUGUAAgaaaUU |
| | sequence | aUAACACUACAAGUUCAAA | ACACUACAAGUUCAAAUAAGCU |
| | | UAAGCUUCGUAGCGAAUCG | UUUAGCGAAAACAUCGCCUUCG |
| | | AUCGCCUUUGGCGAACUCA | GCGAAUUUUUU (SEQ ID NO: |
| | | CAGUGUGUGAGACAGCAGA | 1723) |
| | | CCCCGAAAGGGGUCUGUUU | |
| | | UUAUUUUAUGCGCAUUUUU | |
| | | U (SEQ ID NO: 1693) | |
| tracrRNA V3 | tracrRNA | — | AAGCUUUUAGC (SEQ ID NO: |
| sequences | Portion 1 | | 1724) |
| | tracrRNA | UCGCCUUUGGCGAACUCAC | GAAAACAUCGCCUUCGGCGAAU |
| | Portion 2 | A (SEQ ID NO: 1694) | UUUUU (SEQ ID NO: 1725) |
| | tracrRNA | — | GAAAACAUCGCCUUCGGCGAAU |
| | Portion 2- | | UUUUU (SEQ ID NO: 1726) |
| | partial | | |
| | tracrRNA | — | GAAAACAUCGCCUUCGGCGAA |
| | Portion 2- | | (SEQ ID NO: 1727) |
| | without | | |
| | polyT | | |
| | tracrRNA | GUGUGUGAGACAGCAGACC | — |
| | Portion 3 | CCGAAAGGGGUCUGUUUUU | |
| | | AUUUUAUGCGCAUUUUUU | |
| | | (SEQ ID NO: 1695) | |
| | tracrRNA | GUGUGUGAGACAGCAGACC | — |
| | Portion 3- | CCGAAAGGGGUCUGUUUUU | |
| | partial | AUUUUAUGCGC (SEQ ID NO: | |
| | | 1696) | |
| | tracrRNA | GUGUGUGAGACAGCAGACC | — |
| | Portion 3- | CCGAAAGGGGUCUGUUUUU | |
| | without | AUUUUAUGCGCA (SEQ ID | |
| | polyT | NO: 1697) | |
| | sgRNA V4 | GUUUGAGAGUAGUGUUAgaa | GUUUGAGAGUAGUGUAAgaaaUU |
| | sequence | aUAACACUACAAGUUCAAA | ACACUACAAGUUCAAAUAAGCU |
| | | UAAGCUUCGUAGCGAAUCG | UCUAGCGAAAACAUCGCCUUCG |
| | | AUCGCCUUUGGCGAACUCA | GCGAAUUUUUU (SEQ ID NO: |
| | | CAGUGUGUGAGACAGCAGA | 1728) |
| | | CCCCGAAAGGGGUCUGUUC | |
| | | UUAUCUUAUGCGCAUUUUU | |
| | | U (SEQ ID NO: 1698) | |
| tracrRNA V4 | tracrRNA | — | AAGCUUCUAGC (SEQ ID NO: |
| sequences | Portion 1 | | 1729) |
| | tracrRNA | GUGUGUGAGACAGCAGACC | — |
| | Portion 3 | CCGAAAGGGGUCUGUUCUU | |
| | | AUCUUAUGCGCAUUUUUU | |
| | | (SEQ ID NO: 1699) | |
| | tracrRNA | GUGUGUGAGACAGCAGACC | — |
| | Portion 3- | CCGAAAGGGGUCUGUUCUU | |
| | partial | AUCUUAUGCGC (SEQ ID NO: | |
| | | 1700) | |
| | tracrRNA | GUGUGUGAGACAGCAGACC | — |
| | Portion 3- | CCGAAAGGGGUCUGUUCUU | |
| | without | AUCUUAUGCGCA (SEQ ID | |
| | polyT | NO: 1701) | |
| | | OMNI-346 | OMNI-347 |
| | sgRNA V1 | GUUUGAGAGUAGUGUAAgaa | GUUUGAGAGUAGUGUAAgaaaUU |
| | sequence | aUCACACUACAAGUUCAAA | ACACUACAAAGUUCAAAUAAGC |
| | | UAAGCUUUUAGCGAAGACA | UUGUAGCGAAACCAUCGCGUAA |
| | | UCGCCUCUGGCGAACUCAC | GCGAACUCACAGUGUGUGAGAU |
| | | AGUGUGUGAGACAACAGAC | CAAAAAGCUCCGAAAGGAGCUU |
| | | UCCGAAAGGGGUCUGUUUU | UUUU (SEQ ID NO: 1748) |
| | | UU (SEQ ID NO: 1730) | |
| crRNA: tracr | crRNA | GUUUGAGAGUAGUGUAA | GUUUGAGAGUAGUGUAA (SEQ |
| RNA duplex | (Repeat) | (SEQ ID NO: 1731) | ID NO: 1749) |
| V1 sequences | Partial | GUUUGAGAGUAGUGU (SEQ | GUUUGAGAGUAGUGU (SEQ ID |
| | crRNA 1 | ID NO: 1732) | NO: 1750) |
| | Partial | GUUUGAGAGUAG (SEQ ID | GUUUGAGAGUAG (SEQ ID NO: |
| | crRNA 2 | NO: 1733) | 1751) |
| | Partial | GUUUGAGAGU (SEQ ID NO: | GUUUGAGAGU (SEQ ID NO: 1752) |
| | crRNA 3 | 1734) | |
| | tracrRNA | UCACACUACAAGUUCAAAU | UUACACUACAAAGUUCAAAU |
| | (Antirepeat) | (SEQ ID NO: 1735) | (SEQ ID NO: 1753) |
| | Partial | UCACACUACAAGUUCAAAU | ACACUACAAAGUUCAAAU (SEQ |
| | tracrRNA 1 | (SEQ ID NO: 1736) | ID NO: 1754) |
| | Partial | CUACAAGUUCAAAU (SEQ ID | CUACAAAGUUCAAAU (SEQ ID |
| | tracrRNA 2 | NO: 1737) | NO: 1755) |
| | Partial | ACAAGUUCAAAU (SEQ ID | ACAAAGUUCAAAU (SEQ ID NO: |
| | tracrRNA 3 | NO: 1738) | 1756) |
| tracrRNA V1 | tracrRNA | AAGCUUUUAGCGAAGACA | AAGCUUGUAGCGAAACCAUCGC |
| sequences | Portion 1 | (SEQ ID NO: 1739) | GUAAGC (SEQ ID NO: 1757) |
| | tracrRNA | AAGCUUUUAGC (SEQ ID NO: | AAGCUUGUAGCGAAACCAUCGC |
| | Portion 1- | 1740) | GUAAGC (SEQ ID NO: 1758) |
| | partial | | |
| | tracrRNA | UCGCCUCUGGCGAA (SEQ ID | GAACUCACAGUGUGUGAGAUC |
| | Portion 2 | NO: 1741) | (SEQ ID NO: 1759) |
| | tracrRNA | UCGCCUCUGGCGA (SEQ ID | GAACUCACAGUGUGUGAGAUC |
| | Portion 2- | NO: 1742) | (SEQ ID NO: 1760) |
| | partial | | |
| | tracrRNA | CUCACAGUGUGUGAGAC | AAAAAGCUCCGAAAGGAGCUUU |
| | Portion 3 | (SEQ ID NO: 1743) | UUU (SEQ ID NO: 1761) |
| | tracrRNA | CUCACAGUGUGUGAG (SEQ | AAAAAGCUCCGAAAGGAGCUUU |
| | Portion 3- | ID NO: 1744) | UU (SEQ ID NO: 1762) |
| | partial | | |
| | tracrRNA | — | AAAAAGCUCCGAAAGGAGC (SEQ |
| | Portion 3- | | ID NO: 1763) |
| | without | | |
| | polyT | | |
| | tracrRNA | AACAGACUCCGAAAGGGGU | — |
| | Portion 4 | CUGUUUUUU (SEQ ID NO: | |
| | | 1745) | |
| | tracrRNA | AACAGACUCCGAAAGGGGU | — |
| | Portion 4- | CUGUU (SEQ ID NO: 1746) | |
| | partial | | |
| | tracrRNA | AACAGACUCCGAAAGGGGU | — |
| | Portion 4- | CUG (SEQ ID NO: 1747) | |
| | without | | |
| | polyT | | |
| | sgRNA V3 | — | GUUUGAGAGUAGUGUAAgaaaUU |
| | sequence | | ACACUACAAAGUUCAAAUAAGC |
| | | | UUGUAGCGAAACCAUCGCGUAA |
| | | | GCGAACUCACAGUGUGUGAGAU |
| | | | CAAAAAGCUCCGAAAGGAGCUU |
| | | | UUUGUUUUUU (SEQ ID NO: 1764) |
| tracrRNA V3 | tracrRNA | — | AAGCUUGUAGCGAAACCAUCGC |
| sequences | Portion 1 | | GUAAGCGAA (SEQ ID NO: 1765) |
| | tracrRNA | — | CUCACAGUGUGUGAGAU (SEQ ID |
| | Portion 2 | | NO: 1766) |
| | tracrRNA | — | CUCACAGUGUGUGAG (SEQ ID |
| | Portion 2- | | NO: 1767) |
| | partial | | |
| | tracrRNA | — | CAAAAAGCUCCGAAAGGAGCUU |
| | Portion 3 | | UUUGUUUUUU (SEQ ID NO: 1768) |
| | tracrRNA | — | CAAAAAGCUCCGAAAGGAGCUU |
| | Portion 3- | | UUUG (SEQ ID NO: 1769) |
| | partial | | |
| | tracrRNA | | CAAAAAGCUCCGAAAGGAGCUU |
| | Portion 3- | | UUUG (SEQ ID NO: 1770) |
| | without | | |
| | polyT | | |
| | sgRNA V4 | — | GUUUGAGAGUAGUGUAAgaaaUU |
| | sequence | | ACACUACAAAGUUCAAAUAAGC |
| | | | UUGUAGCGAAACCAUCGCGUAA |
| | | | GCGAACUCACAGUGUGUGAGAU |
| | | | CAAGAAGCUCCGAAAGGAGCUU |
| | | | CUUGUUUUUU (SEQ ID NO: 1771) |
| tracrRNA V4 | tracrRNA | — | CAAGAAGCUCCGAAAGGAGCUU |
| sequences | Portion 3 | | CUUGUUUUUU (SEQ ID NO: 1772) |
| | tracrRNA | — | CAAGAAGCUCCGAAAGGAGCUU |
| | Portion 3- | | CUUG (SEQ ID NO: 1773) |
| | partial | | |
| | tracrRNA | — | CAAGAAGCUCCGAAAGGAGCUU |
| | Portion 3- | | CUUG (SEQ ID NO: 1774) |
| | without | | |
| | polyT | | |
| | | OMNI-348 | OMNI-349 |
| | sgRNA V1 | GUUUUAGUUCUAUGUCgaaa | GUUUGAGAGUAGUGUAAgaaaUU |
| | sequence | GACAUAGAGAGUUAAAAUA | ACACUAUGAGUUCAAAUAAACU |
| | | AAGGUUUUCGUUUCGAUUA | UUUUUCAAAUCGCCGCUUAUGC |
| | | CCCAAAAUGCCCAUUUAUU | GGUUCACGCUGUGUGAAUUAAG |
| | | AUGUGGCCGACUACUUAGG | CUCUCAUCUGUGGGAGCUUUUU |
| | | UAGUCAUUUUUU (SEQ ID | U (SEQ ID NO: 1802) |
| | | NO: 1775) | |
| crRNA: tracr | crRNA | GUUUUAGUUCUAUGUC | GUUUGAGAGUAGUGUAA (SEQ |
| RNA duplex | (Repeat) | (SEQ ID NO: 1776) | ID NO: 1803) |
| V1 sequences | Partial | GUUUUAGUUCUAUGU (SEQ | GUUUGAGAGUAGUGU (SEQ ID |
| | crRNA 1 | ID NO: 1777) | NO: 1804) |
| | Partial | GUUUUAGUUCUA (SEQ ID | GUUUGAGAGUAG (SEQ ID NO: |
| | crRNA 2 | NO: 1778) | 1805) |
| | Partial | GUUUUAGUUC (SEQ ID NO: | GUUUGAGAGU (SEQ ID NO: 1806) |
| | crRNA 3 | 1779) | |
| | tracrRNA | GACAUAGAGAGUUAAAAU | UUACACUAUGAGUUCAAAU |
| | (Antirepeat) | (SEQ ID NO: 1780) | (SEQ ID NO: 1807) |
| | Partial | ACAUAGAGAGUUAAAAU | ACACUAUGAGUUCAAAU (SEQ ID |
| | tracrRNA 1 | (SEQ ID NO: 1781) | NO: 1808) |
| | Partial | UAGAGAGUUAAAAU (SEQ | CUAUGAGUUCAAAU (SEQ ID NO: |
| | tracrRNA 2 | ID NO: 1782) | 1809) |
| | Partial | GAGAGUUAAAAU (SEQ ID | AUGAGUUCAAAU (SEQ ID NO: |
| | tracrRNA 3 | NO: 1783) | 1810) |
| tracrRNA V1 | tracrRNA | AAAGGUUUUCGUUUCGAUU | AAACUUUUUUCAAAUCGCCGCU |
| sequences | Portion 1 | ACCCAAAAU (SEQ ID NO: | UAUGCGGU (SEQ ID NO: 1811) |
| | | 1784) | |
| | tracrRNA | AAAGGUUUUCGUUUCGAUU | AAACUUUUUUCAAAUCGCCGCU |
| | Portion 1- | ACC (SEQ ID NO: 1785) | UAUGCGGU (SEQ ID NO: 1812) |
| | partial | | |
| | tracrRNA | GCCCAUUUAUUAUGUGGCC | UCACGCUGUGUGAAUU (SEQ ID |
| | Portion 2 | (SEQ ID NO: 1786) | NO: 1813) |
| | tracrRNA | GCCCAUUUAUUAUGUGGC | UCACGCUGUGUGA (SEQ ID NO: |
| | Portion 2- | (SEQ ID NO: 1787) | 1814) |
| | partial | | |
| | tracrRNA | GACUACUUAGGUAGUCAUU | AAGCUCUCAUCUGUGGGAGCUU |
| | Portion 3 | UUUU (SEQ ID NO: 1788) | UUUU (SEQ ID NO: 1815) |
| | tracrRNA | GACUACUUAGGUAGUC | AAGCUCUCAUCUGUGGGAGCUU |
| | Portion 3- | (SEQ ID NO: 1789) | (SEQ ID NO: 1816) |
| | partial | | |
| | tracrRNA | GACUACUUAGGUAGUCA | AAGCUCUCAUCUGUGGGAGC |
| | Portion 3- | (SEQ ID NO: 1790) | (SEQ ID NO: 1817) |
| | without | | |
| | polyT | | |
| | sgRNA V2 | GUUCUAGUUCUAUGUCgaaa | GUUUGAGAGUAGUGUAAgaaaUU |
| | sequence | GACAUAGAGAGUUAGAAUA | ACACUAUGAGUUCAAAUAAACU |
| | | AAGGUUCUCGUUUCGAUUA | UCUUUCAAAUCGCCGCUUAUGC |
| | | CCCAAAAUGCCCAUUUAUU | GGUUCACGCUGUGUGAAUUAAG |
| | | AUGUGGCCGACUACUUAGG | CUCUCAUCUGUGGGAGCUUUUU |
| | | UAGUCAUUUUUU (SEQ ID | U (SEQ ID NO: 1818) |
| | | NO: 1791) | |
| crRNA: tracr | crRNA | GUUCUAGUUCUAUGUC | — |
| RNA duplex | (Repeat) | (SEQ ID NO: 1792) | |
| V2 sequences | Partial | GUUCUAGUUCUAUGU (SEQ | — |
| | crRNA 1 | ID NO: 1793) | |
| | Partial | GUUCUAGUUCUA (SEQ ID | — |
| | crRNA 2 | NO: 1794) | |
| | Partial | GUUCUAGUUC (SEQ ID NO: | — |
| | crRNA 3 | 1795) | |
| | tracrRNA | GACAUAGAGAGUUAGAAU | — |
| | (Antirepeat) | (SEQ ID NO: 1796) | |
| | Partial | ACAUAGAGAGUUAGAAU | — |
| | tracrRNA 1 | (SEQ ID NO: 1797) | |
| | Partial | UAGAGAGUUAGAAU (SEQ | — |
| | tracrRNA 2 | ID NO: 1798) | |
| | Partial | GAGAGUUAGAAU (SEQ ID | — |
| | tracrRNA 3 | NO: 1799) | |
| tracrRNA V2 | tracrRNA | AAAGGUUCUCGUUUCGAUU | AAACUUCUUUCAAAUCGCCGCU |
| sequences | Portion 1 | ACCCAAAAU (SEQ ID NO: | UAUGCGGU (SEQ ID NO: 1819) |
| | | 1800) | |
| | tracrRNA | AAAGGUUCUCGUUUCGAUU | AAACUUCUUUCAAAUCGCCGCU |
| | Portion 1- | ACC (SEQ ID NO: 1801) | UAUGCGGU (SEQ ID NO: 1820) |
| | partial | | |
| | sgRNA V3 | — | GUUUGAGAGUAGUGUAAgaaaUU |
| | sequence | | ACACUAUGAGUUCAAAUAAACU |
| | | | UUUUUCAAAUCGCCGCUUAUGC |
| | | | GGUUCACGCUGUGUGAAUUAAG |
| | | | CUCUCAUCUGUGGGAGCUUUUU |
| | | | UAUUGCUUUUUU (SEQ ID NO: |
| | | | 1821) |
| tracrRNA V3 | tracrRNA | — | AAACUUUUUUCAAAUCGCCGCU |
| sequences | Portion 1 | | UAUGCGGUUCAC (SEQ ID NO: |
| | | | 1822) |
| | tracrRNA | — | GCUGUGUGAAUUAAGCUCUCAU |
| | Portion 2 | | CUGUGGGAGCUUUUUUAUUGCU |
| | | | UUUUU (SEQ ID NO: 1823) |
| | tracrRNA | — | GCUGUGUGAAUUAAGCUCUCAU |
| | Portion 2- | | CUGUGGGAGCUUUUUUAUUGC |
| | partial | | (SEQ ID NO: 1824) |
| | tracrRNA | — | GCUGUGUGAAUUAAGCUCUCAU |
| | Portion 2- | | CUGUGGGAGCUUUUUUAUUGC |
| | without | | (SEQ ID NO: 1825) |
| | polyT | | |
| | sgRNA V4 | — | GUUUGAGAGUAGUGUAAgaaaUU |
| | sequence | | ACACUAUGAGUUCAAAUAAACU |
| | | | UCUUUCAAAUCGCCGCUUAUGC |
| | | | GGUUCACGCUGUGUGAAUUAAG |
| | | | CUCUCAUCUGUGGGAGCUUCUU |
| | | | UAUUGCUUUUUU (SEQ ID NO: |
| | | | 1826) |
| tracrRNA V4 | tracrRNA | — | AAGCUCUCAUCUGUGGGAGCUU |
| sequences | Portion 3 | | CUUUAUUGCUUUUUU (SEQ ID |
| | | | NO: 1827) |
| | tracrRNA | — | AAGCUCUCAUCUGUGGGAGCUU |
| | Portion 3- | | CUUUAUUGC (SEQ ID NO: 1828) |
| | without | | |
| | polyT | | |
| | | OMNI-350 | OMNI-351 |
| | sgRNA V1 | GUUUGAGAGUAGUGUUGgaa | GUUUGAGUAUGGUGUAAgaaaUU |
| | sequence | aCGACACUACAAGUUCAAA | ACACUAUUAGUUCAAAUAAAAU |
| | | UAAAGACUUGUCCAAAUCG | UUUUUCACAUCGCCGAAAUUUU |
| | | UCUCUUUAAGAGGCUCCGC | CGGUAACACACGCUGUGUGUAC |
| | | AUAGUGCGGAUAGAGAAUC | AUCUAUCCGCUUUAUGUAAGCG |
| | | UACGAAAGUAGAUUCUUUU | GAUUUUUU (SEQ ID NO: 1845) |
| | | UU (SEQ ID NO: 1829) | |
| crRNA: tracr | crRNA | GUUUGAGAGUAGUGUUG | GUUUGAGUAUGGUGUAA (SEQ |
| RNA duplex | (Repeat) | (SEQ ID NO: 1830) | ID NO: 1846) |
| V1 sequences | Partial | GUUUGAGAGUAGUGU (SEQ | GUUUGAGUAUGGUGU (SEQ ID |
| | crRNA 1 | ID NO: 1831) | NO: 1847) |
| | Partial | GUUUGAGAGUAG (SEQ ID | GUUUGAGUAUGG (SEQ ID NO: X) |
| | crRNA 2 | NO: 1832) | (SEQ ID NO: 1848) |
| | Partial | GUUUGAGAGU (SEQ ID NO: | GUUUGAGUAU (SEQ ID NO: 1849) |
| | crRNA 3 | 1833) | |
| | tracrRNA | CGACACUACAAGUUCAAAU | UUACACUAUUAGUUCAAAU |
| | (Antirepeat) | (SEQ ID NO: 1834) | (SEQ ID NO: 1850) |
| | Partial | ACACUACAAGUUCAAAU | ACACUAUUAGUUCAAAU (SEQ ID |
| | tracrRNA 1 | (SEQ ID NO: 1835) | NO: 1851) |
| | Partial | CUACAAGUUCAAAU (SEQ ID | CUAUUAGUUCAAAU (SEQ ID NO: |
| | tracrRNA 2 | NO: 1836) | 1852) |
| | Partial | ACAAGUUCAAAU (SEQ ID | AUUAGUUCAAAU (SEQ ID NO: |
| | tracrRNA 3 | NO: 1837) | 1853) |
| tracrRNA V1 | tracrRNA | AAAGACUUGUCCAAAUCGU | AAAAUUUUUUCACAUCGCCGAA |
| sequences | Portion 1 | CUCUUUAAGAGGC (SEQ ID | AUUUUCGGUA (SEQ ID NO: 1854) |
| | | NO: 1838) | |
| | tracrRNA | AAAGACUUGUCCAAAUCGU | AAAAUUUUUUCACAUCGCCGAA |
| | Portion 1- | CUCUUUAAGAGGC (SEQ ID | AUUUUCGGU (SEQ ID NO: 1855) |
| | partial | NO: 1839) | |
| | tracrRNA | UCCGCAUAGUGCGGAU | ACACACGCUGUGUGUACAUCU |
| | Portion 2 | (SEQ ID NO: 1840) | (SEQ ID NO: 1856) |
| | tracrRNA | UCCGCAUAGUGCGGA (SEQ | ACACACGCUGUGUGU (SEQ ID |
| | Portion 2- | ID NO: 1841) | NO: 1857) |
| | partial | | |
| | tracrRNA | AGAGAAUCUACGAAAGUAG | AUCCGCUUUAUGUAAGCGGAUU |
| | Portion 3 | AUUCUUUUUU (SEQ ID NO: | UUUU (SEQ ID NO: 1858) |
| | | 1842) | |
| | tracrRNA | AGAGAAUCUACGAAAGUAG | AUCCGCUUUAUGUAAGCGGAU |
| | Portion 3- | AUUCUUU (SEQ ID NO: 1843) | (SEQ ID NO: 1859) |
| | partial | | |
| | tracrRNA | AGAGAAUCUACGAAAGUAG | AUCCGCUUUAUGUAAGCGGA |
| | Portion 3- | AUUC (SEQ ID NO: 1844) | (SEQ ID NO: 1860) |
| | without | | |
| | polyT | | |
| | sgRNA V2 | — | GUUUGAGUAUGGUGUAAgaaaUU |
| | sequence | | ACACUAUUAGUUCAAAUAAAAU |
| | | | UCUUUCACAUCGCCGAAACUUU |
| | | | CGGUAACACACGCUGUGUGUAC |
| | | | AUCUAUCCGCUUUAUGUAAGCG |
| | | | GAUUUUUU (SEQ ID NO: 1861) |
| tracrRNA V2 | tracrRNA | — | AAAAUUCUUUCACAUCGCCGAA |
| sequences | Portion 1 | | ACUUUCGGUA (SEQ ID NO: 1862) |
| | tracrRNA | — | AAAAUUCUUUCACAUCGCCGAA |
| | Portion 1- | | ACUUUCGGU (SEQ ID NO: 1863) |
| | partial | | |
| | sgRNA V3 | — | GUUUGAGUAUGGUGUAAgaaaUU |
| | sequence | | ACACUAUUAGUUCAAAUAAAAU |
| | | | UUUUUCACAUCGCCGAAAUUUU |
| | | | CGGUAACACACGCUGUGUGUUU |
| | | | UUU (SEQ ID NO: 1864) |
| tracrRNA V3 | tracrRNA | — | AAAAUUUUUUCACAUCGCCGAA |
| sequences | Portion 1 | | AUUUUCGGU (SEQ ID NO: 1865) |
| | tracrRNA | — | AACACACGCUGUGUGUUUUUU |
| | Portion 2 | | (SEQ ID NO: 1866) |
| | tracrRNA | | AACACACGCUGUGUGUU (SEQ ID |
| | Portion 2- | | NO: 1867) |
| | partial | | |
| | tracrRNA | — | AACACACGCUGUGUG (SEQ ID |
| | Portion 2- | | NO: 1868) |
| | without | | |
| | polyT | | |
| | ssgRNA V4 | — | GUUUGAGUAUGGUGUAAgaaaUU |
| | equence | | ACACUAUUAGUUCAAAUAAAAU |
| | | | UCUUUCACAUCGCCGAAACUUU |
| | | | UUU (SEQ ID NO: 1869) |
| tracrRNA V4 | tracrRNA | — | AAAAUUCUUUCACAUCGCCGAA |
| sequences | Portion 1 | | ACUUUCGGU (SEQ ID NO: 1870) |
| | | OMNI-352 | OMNI-353 |
| | sgRNA V1 | GUUUUAGAUCUAUGUCAgaa | GUUUGAGAAUGAUGUAAgaaaUU |
| | sequence | aUGACAUAGAGAGUUAAAA | ACAUCAUAAGUUCAAAUAAGAA |
| | | UAAAGGUUUAACCCUAAAU | UUUAUUCAAAACGCCGUCUUAG |
| | | ACUCUAUUUGAGCGACUGC | AUGGCCCACAGUGUGUGGAACA |
| | | UUUGGCAGUCUUUUUUU | AAAAGUCUGCUAUGCAGACUUU |
| | | (SEQ ID NO: 1871) | UUU (SEQ ID NO: 1896) |
| crRNA: tracr | crRNA | GUUUUAGAUCUAUGUCA | GUUUGAGAAUGAUGUAA (SEQ |
| RNA duplex | (Repeat) | (SEQ ID NO: 1872) | ID NO: 1897) |
| V1 sequences | Partial | GUUUUAGAUCUAUGU (SEQ | GUUUGAGAAUGAUGU (SEQ ID |
| | crRNA 1 | ID NO: 1873) | NO: 1898) |
| | Partial | GUUUUAGAUCUA (SEQ ID | GUUUGAGAAUGA (SEQ ID NO: |
| | crRNA 2 | NO: 1874) | 1899) |
| | Partial | GUUUUAGAUC (SEQ ID NO: | GUUUGAGAAU (SEQ ID NO: 1900) |
| | crRNA 3 | 1875) | |
| | tracrRNA | UGACAUAGAGAGUUAAAAU | UUACAUCAUAAGUUCAAAU |
| | (Antirepeat) | (SEQ ID NO: 1876) | (SEQ ID NO: 1901) |
| | Partial | ACAUAGAGAGUUAAAAU | ACAUCAUAAGUUCAAAU (SEQ ID |
| | tracrRNA 1 | (SEQ ID NO: 1877) | NO: 1902) |
| | Partial | UAGAGAGUUAAAAU (SEQ | UCAUAAGUUCAAAU (SEQ ID NO: |
| | tracrRNA 2 | ID NO: 1878) | 1903) |
| | Partial | GAGAGUUAAAAU (SEQ ID | AUAAGUUCAAAU (SEQ ID NO: |
| | tracrRNA 3 | NO: 1879) | 1904) |
| tracrRNA V1 | tracrRNA | AAAGGUUUAACCCUAAAUA | AAGAAUUUAUUCAAAACGCCGU |
| sequences | Portion 1 | (SEQ ID NO: 1880) | CUUAGAUGGC (SEQ ID NO: 1905) |
| | tracrRNA | AAAGGUUUAACCCU (SEQ ID | AAGAAUUUAUUCAAAACGCCGU |
| | Portion 1- | NO: 1881) | CUUAGAUGGC (SEQ ID NO: 1906) |
| | partial | | |
| | tracrRNA | CUCUAUUUGAGC (SEQ ID | CCACAGUGUGUGGAAC (SEQ ID |
| | Portion 2 | NO: 1882) | NO: 1907) |
| | tracrRNA | CUCUAUUUGAG (SEQ ID NO: | CCACAGUGUGUGG (SEQ ID NO: |
| | Portion 2- | 1883) | 1908) |
| | partial | | |
| | tracrRNA | GACUGCUUUGGCAGUCUUU | AAAAAGUCUGCUAUGCAGACUU |
| | Portion 3 | UUUU (SEQ ID NO: 1884) | UUUU (SEQ ID NO: 1909) |
| | tracrRNA | GACUGCUUUGGCAGUC | AAAAAGUCUGCUAUGCAGACUU |
| | Portion 3- | (SEQ ID NO: 1885) | UUU (SEQ ID NO: 1910) |
| | partial | | |
| | tracrRNA | GACUGCUUUGGCAGUC | AAAAAGUCUGCUAUGCAGAC |
| | Portion 3- | (SEQ ID NO: 1886) | (SEQ ID NO: 1911) |
| | without | | |
| | polyT | | |
| | sgRNA V2 | GUUCUAGAUCUAUGUCAgaa | — |
| | sequence | aUGACAUAGAGAGUUAGAA | |
| | | UAAAGGUUUAACCCUAAAU | |
| | | ACUCUAUUUGAGCGACUGC | |
| | | UUUGGCAGUCUUUUUUU | |
| | | (SEQ ID NO: 1887) | |
| crRNA: tracr | crRNA | GUUCUAGAUCUAUGUCA | — |
| RNA duplex | (Repeat) | (SEQ ID NO: 1888) | |
| V2 sequences | Partial | GUUCUAGAUCUAUGU (SEQ | — |
| | crRNA 1 | ID NO: 1889) | |
| | Partial | GUUCUAGAUCUA (SEQ ID | — |
| | crRNA 2 | NO: 1890) | |
| | Partial | GUUCUAGAUC (SEQ ID NO: | — |
| | crRNA 3 | 1891) | |
| | tracrRNA | UGACAUAGAGAGUUAGAAU | — |
| | (Antirepeat) | (SEQ ID NO: 1892) | |
| | Partial | ACAUAGAGAGUUAGAAU | — |
| | tracrRNA 1 | (SEQ ID NO: 1893) | |
| | Partial | UAGAGAGUUAGAAU (SEQ | |
| | tracrRNA 2 | ID NO: 1894) | |
| | Partial | GAGAGUUAGAAU (SEQ ID | — |
| | tracrRNA 3 | NO: 1895) | |
| | | OMNI-354 | OMNI-356 |
| | sgRNA V1 | GUUUGAGAGUAGUGUAAgaa | GUUUGGUAGCUGUGUgaaaACAC |
| | sequence | aUUACACUACAAAGUUCAA | AGCAUGUCCAAAUAAAAACAUG |
| | | AUAAGCUUUUAGCGAAAUC | UUCAAAAUGCCCUAUAGAGGGU |
| | | AUCGCAAUGCGAAUGCACA | UAUAAACAUCCAUUUAGUGGGU |
| | | GUGUGUGCUCAGUAAGACC | GUUUUUUU (SEQ ID NO: 1931) |
| | | UCAUUACGAGGUCUUUUUU | |
| | | (SEQ ID NO: 1912) | |
| | crRNA | GUUUGAGAGUAGUGUAA | GUUUGGUAGCUGUGU (SEQ ID |
| | (Repeat) | (SEQ ID NO: 1913) | NO: 1932) |
| crRNA: tracr | Partial | GUUUGAGAGUAGUGU (SEQ | — |
| RNA duplex | crRNA 1 | ID NO: 1914) | |
| V1 sequences | Partial | GUUUGAGAGUAG (SEQ ID | GUUUGGUAGCUG (SEQ ID NO: |
| | crRNA 2 | NO: 1915) | 1933) |
| | Partial | GUUUGAGAGU (SEQ ID NO: | GUUUGGUAGC (SEQ ID NO: 1934) |
| | crRNA 3 | 1916) | |
| | tracrRNA | UUACACUACAAAGUUCAAA | ACACAGCAUGUCCAAAU (SEQ ID |
| | (Antirepeat) | U (SEQ ID NO: 1917) | NO: 1935) |
| | Partial | ACACUACAAAGUUCAAAU | — |
| | tracrRNA 1 | (SEQ ID NO: 1918) | |
| | Partial | CUACAAAGUUCAAAU (SEQ | CAGCAUGUCCAAAU (SEQ ID NO: |
| | tracrRNA 2 | ID NO: 1919) | 1936) |
| | Partial | ACAAAGUUCAAAU (SEQ ID | GCAUGUCCAAAU (SEQ ID NO: |
| | tracrRNA 3 | NO: 1920) | 1937) |
| tracrRNA V1 | tracrRNA | AAGCUUUUAGCGAAAUCAU | AAAAACAUGUUCAAAAUGCCCU |
| sequences | Portion 1 | CGCAA (SEQ ID NO: 1921) | AUAGAGGGUUAU (SEQ ID NO: |
| | | | 1938) |
| | tracrRNA | AAGCUUUUAGCGAAAUCAU | AAAAACAUGUUCAAAAUGCCCU |
| | Portion 1- | CGC (SEQ ID NO: 1922) | AUAGAGGGU (SEQ ID NO: 1939) |
| | partial | | |
| | tracrRNA | UGCGAAUGCACAGUGUGUG | AAACAUCCAUUUAGUGGGUGUU |
| | Portion 2 | CUCAGUA (SEQ ID NO: 1923) | UUUUU (SEQ ID NO: 1940) |
| | tracrRNA | UGCGAAUGCACAGUGUGUG | AAACAUCCAUUUAGUGGGUGUU |
| | Portion 2- | CUCAGUA (SEQ ID NO: 1924) | U (SEQ ID NO: 1941) |
| | partial | | |
| | tracrRNA | — | AAACAUCCAUUUAGUGGGUG |
| | Portion 2- | | (SEQ ID NO: 1942) |
| | without | | |
| | polyT | | |
| | tracrRNA | AGACCUCAUUACGAGGUCU | — |
| | Portion 3 | UUUUU (SEQ ID NO: 1925) | |
| | tracrRNA | AGACCUCAUUACGAGGUCU | — |
| | Portion 3- | (SEQ ID NO: 1926) | |
| | partial | | |
| | tracrRNA | AGACCUCAUUACGAGGUC | — |
| | Portion 3- | (SEQ ID NO: 1927) | |
| | without | | |
| | polyT | | |
| | sgRNA V2 | GUUUGAGAGUAGUGUAAgaa | — |
| | sequence | aUUACACUACAAAGUUCAA | |
| | | AUAAGCUUCUAGCGAAAUC | |
| | | AUCGCAAUGCGAAUGCACA | |
| | | GUGUGUGCUCAGUAAGACC | |
| | | UCAUUACGAGGUCUUUUUU | |
| | | (SEQ ID NO: 1928) | |
| tracrRNA V2 | tracrRNA | AAGCUUCUAGCGAAAUCAU | — |
| sequences | Portion 1 | CGCAA (SEQ ID NO: 1929) | |
| | tracrRNA | AAGCUUCUAGCGAAAUCAU | — |
| | Portion 1- | CGC (SEQ ID NO: 1930) | |
| | partial | | |
| | | OMNI-357 | OMNI-358 |
| | sgRNA V1 | GUUUUAGAUGUAUGUAAgaa | GUUUGAGAACCUUGUAAgaaaUU |
| | sequence | aUUACAUGCAAAGUUAAAA | ACAAGGUGAGUGCAAAUAAGGA |
| | | UAAAUGUUAUACUAAAUGC | UUUUUCCGAAAUCGCUCAUUUA |
| | | CUUUUAUAGGUCCCGUUUU | UAUGAGUCCGCAUGGUGCGGUU |
| | | GACGGGGGAGAUGCCACUA | AAAAGACCUAUUUUUAGGUCUU |
| | | UCGUGGCAUUUUUU (SEQ | UUUU (SEQ ID NO: 1972) |
| | | ID NO: 1943) | |
| crRNA: tracr | crRNA | GUUUUAGAUGUAUGUAA | GUUUGAGAACCUUGUAA (SEQ ID |
| RNA duplex | (Repeat) | (SEQ ID NO: 1944) | NO: 1973) |
| V1 sequences | Partial | GUUUUAGAUGUAUGU (SEQ | GUUUGAGAACCUUGU (SEQ ID |
| | crRNA 1 | ID NO: 1945) | NO: 1974) |
| | Partial | GUUUUAGAUGUA (SEQ ID | GUUUGAGAACCU (SEQ ID NO: |
| | crRNA 2 | NO: 1946) | 1975) |
| | Partial | GUUUUAGAUG (SEQ ID NO: | GUUUGAGAAC (SEQ ID NO: 1976) |
| | crRNA 3 | 1947) | |
| | tracrRNA | UUACAUGCAAAGUUAAAAU | UUACAAGGUGAGUGCAAAU |
| | (Antirepeat) | (SEQ ID NO: 1948) | (SEQ ID NO: 1977) |
| | Partial | ACAUGCAAAGUUAAAAU | ACAAGGUGAGUGCAAAU (SEQ ID |
| | tracrRNA 1 | (SEQ ID NO: 1949) | NO: 1978) |
| | Partial | UGCAAAGUUAAAAU (SEQ | AGGUGAGUGCAAAU (SEQ ID NO: |
| | tracrRNA 2 | ID NO: 1950) | 1979) |
| | Partial | CAAAGUUAAAAU (SEQ ID | GUGAGUGCAAAU (SEQ ID NO: |
| | tracrRNA 3 | NO: 1951) | 1980) |
| tracrRNA V1 | tracrRNA | AAAUGUUAUACUAAAUGCC | AAGGAUUUUUCCGAAAUC (SEQ |
| sequences | Portion 1 | UUUUAUAGGU (SEQ ID NO: | ID NO: 1981) |
| | | 1952) | |
| | tracrRNA | AAAUGUUAUACUAAAUGCC | AAGGAUUUUUCC (SEQ ID NO: |
| | Portion 1- | UUUUAUAGGU (SEQ ID NO: | 1982) |
| | partial | 1953) | |
| | tracrRNA | CCCGUUUUGACGGG (SEQ ID | GCUCAUUUAUAUGAGU (SEQ ID |
| | Portion 2 | NO: 1954) | NO: 1983) |
| | tracrRNA | CCCGUUUUGACGGG (SEQ ID | GCUCAUUUAUAUGAGU (SEQ ID |
| | Portion 2- | NO: 1955) | NO: 1984) |
| | partial | | |
| | tracrRNA | GGAGAUGCCACUAUCGUGG | CCGCAUGGUGCGGUU (SEQ ID |
| | Portion 3 | CAUUUUUU (SEQ ID NO: | NO: 1985) |
| | | 1956) | |
| | tracrRNA | GGAGAUGCCACUAUCGUGG | CCGCAUGGUGCGG (SEQ ID NO: |
| | Portion 3- | CAUUUUU (SEQ ID NO: 1957) | 1986) |
| | partial | | |
| | tracrRNA | GGAGAUGCCACUAUCGUGG | — |
| | Portion 3- | CA (SEQ ID NO: 1958) | |
| | without | | |
| | polyT | | |
| | tracrRNA | — | AAAAGACCUAUUUUUAGGUCUU |
| | Portion 4 | | UUUU (SEQ ID NO: 1987) |
| | tracrRNA | — | AAAAGACCUAUUUUUAGGUCUU |
| | Portion 4- | | UU (SEQ ID NO: 1988) |
| | partial | | |
| | tracrRNA | — | AAAAGACCUAUUUUUAGGUC |
| | Portion 4- | | (SEQ ID NO: 1989) |
| | without | | |
| | polyT | | |
| | sgRNA V2 | GUUCUAGAUGUAUGUAAgaa | GUUUGAGAACCUUGUAAgaaaUU |
| | sequence | aUUACAUGCAAAGUUAGAA | ACAAGGUGAGUGCAAAUAAGGA |
| | | UAAAUGUUAUACUAAAUGC | UUCUUCCGAAAUCGCUCAUUUA |
| | | CUUUCAUAGGUCCCGUUUC | UAUGAGUCCGCAUGGUGCGGUU |
| | | GACGGGGGAGAUGCCACUA | AAAAGACCUAUUCUUAGGUCUU |
| | | UCGUGGCAUUUUUU (SEQ | UUUU (SEQ ID NO: 1990) |
| | | ID NO: 1959) | |
| crRNA: tracr | crRNA | GUUCUAGAUGUAUGUAA | — |
| RNA duplex | (Repeat) | (SEQ ID NO: 1960) | |
| V2 sequences | Partial | GUUCUAGAUGUAUGU (SEQ | — |
| | crRNA 1 | ID NO: 1961) | |
| | Partial | GUUCUAGAUGUA (SEQ ID | — |
| | crRNA 2 | NO: 1962) | |
| | Partial | GUUCUAGAUG (SEQ ID NO: | — |
| | crRNA 3 | 1963) | |
| | tracrRNA | UUACAUGCAAAGUUAGAAU | — |
| | (Antirepeat) | (SEQ ID NO: 1964) | |
| | Partial | ACAUGCAAAGUUAGAAU | — |
| | tracrRNA 1 | (SEQ ID NO: 1965) | |
| | Partial | UGCAAAGUUAGAAU (SEQ | — |
| | tracrRNA 2 | ID NO: 1966) | |
| | Partial | CAAAGUUAGAAU (SEQ ID | — |
| | tracrRNA 3 | NO: 1967) | |
| tracrRNA V2 | tracrRNA | AAAUGUUAUACUAAAUGCC | AAGGAUUCUUCCGAAAUC (SEQ |
| sequences | Portion 1 | UUUCAUAGGU (SEQ ID NO: | ID NO: 1991) |
| | | 1968) | |
| | tracrRNA | AAAUGUUAUACUAAAUGCC | AAGGAUUCUUCC (SEQ ID NO: |
| | Portion 1- | UUUCAUAGGU (SEQ ID NO: | 1992) |
| | partial | 1969) | |
| | tracrRNA | CCCGUUUCGACGGG (SEQ ID | — |
| | Portion 2 | NO: 1970) | |
| | tracrRNA | CCCGUUUCGACGGG (SEQ ID | — |
| | Portion 2- | NO: 1971) | |
| | partial | | |
| | tracrRNA | — | AAAAGACCUAUUCUUAGGUCUU |
| | Portion 4 | | UUUU (SEQ ID NO: 1993) |
| | tracrRNA | — | AAAAGACCUAUUCUUAGGUCUU |
| | Portion 4- | | UU (SEQ ID NO: 1994) |
| | partial | | |
| | tracrRNA | — | AAAAGACCUAUUCUUAGGUC |
| | Portion 4- | | (SEQ ID NO: 1995) |
| | without | | |
| | polyT | | |
| | sgRNA V3 | — | GUUUGAGAACCUUGUAAgaaaUU |
| | sequence | | ACAAGGUGAGUGCAAAUAAGGA |
| | | | UUUUUCCGAAAUCGCUCAUUUA |
| | | | UAUGAGUCCGCAUGGUGCGGUU |
| | | | AAAAGACCUAUUUUUU (SEQ ID |
| | | | NO: 1996) |
| tracrRNA V3 | tracrRNA | — | CCGCAUGGUGCGGUUAAAAGAC |
| sequences | Portion 3 | | CUAUUUUUU (SEQ ID NO: 1997) |
| | tracrRNA | — | CCGCAUGGUGCGGUUAAAAGAC |
| | Portion 3- | | CUA (SEQ ID NO: 1998) |
| | without | | |
| | polyT | | |
| | sgRNA V4 | — | GUUUGAGAACCUUGUAAgaaaUU |
| | sequence | | ACAAGGUGAGUGCAAAUAAGGA |
| | | | UUCUUCCGAAAUCGCUCAUUUA |
| | | | UAUGAGUCCGCAUGGUGCGGUU |
| | | | AAAAGACCUAUUUUUU (SEQ ID |
| | | | NO: 1999) |
| | | OMNI-359 | OMNI-360 |
| | sgRNA V1 | GUUUGAGAGUAGUGUGAgaa | GUUUGAGAGCCUUGUUAgaaaUA |
| | sequence | aUCACACUACGAGUUCAAA | ACAAGGCGAGUGCAAAUAAGGA |
| | | UAAAGAUUUUUCCAAAUCG | UUAUUCCGAAAUCGUCUAUUGA |
| | | CCGGUUUGCCGGCCGCACA | CGCUACAUGGUGUAGCAUUUAA |
| | | UUGGUGCUAAAAAAGAUCC | AGUCCGAAAGGACUUUUUUU |
| | | UUCGGGAUCUUUUUU (SEQ | (SEQ ID NO: 2025) |
| | | ID NO: 2000) | |
| | crRNA | GUUUGAGAGUAGUGUGA | GUUUGAGAGCCUUGUUA (SEQ ID |
| | (Repeat) | (SEQ ID NO: 2001) | NO: 2026) |
| crRNA: tracr | Partial | GUUUGAGAGUAGUGU (SEQ | GUUUGAGAGCCUUGU (SEQ ID |
| RNA duplex | crRNA 1 | ID NO: 2002) | NO: 2027) |
| V1 sequences | Partial | GUUUGAGAGUAG (SEQ ID | GUUUGAGAGCCU (SEQ ID NO: |
| | crRNA 2 | NO: 2003) | 2028) |
| | Partial | GUUUGAGAGU (SEQ ID NO: | GUUUGAGAGC (SEQ ID NO: 2029) |
| | crRNA 3 | 2004) | |
| | tracrRNA | UCACACUACGAGUUCAAAU | UAACAAGGCGAGUGCAAAU |
| | (Antirepeat) | (SEQ ID NO: 2005) | (SEQ ID NO: 2030) |
| | Partial | ACACUACGAGUUCAAAU | ACAAGGCGAGUGCAAAU (SEQ ID |
| | tracrRNA 1 | (SEQ ID NO: 2006) | NO: 2031) |
| | Partial | CUACGAGUUCAAAU (SEQ ID | AGGCGAGUGCAAAU (SEQ ID NO: |
| | tracrRNA 2 | NO: 2007) | 2032) |
| | Partial | ACGAGUUCAAAU (SEQ ID | GCGAGUGCAAAU (SEQ ID NO: |
| | tracrRNA 3 | NO: 2008) | 2033) |
| tracrRNA V1 | tracrRNA | AAAGAUUUUUCCAAAUC | AAGGAUUAUUCCGAAAUC (SEQ |
| sequences | Portion 1 | (SEQ ID NO: 2009) | ID NO: 2034) |
| | tracrRNA | AAAGAUUUUUCCAAAUC | AAGGAUUAUUCC (SEQ ID NO: |
| | Portion 1- | (SEQ ID NO: 2010) | 2035) |
| | partial | | |
| | tracrRNA | GCCGGUUUGCCGGCC (SEQ | GUCUAUUGAC (SEQ ID NO: 2036) |
| | Portion 2 | ID NO: 2011) | |
| | tracrRNA | GCCGGUUUGCCGGC (SEQ ID | GUCUAUUGAC (SEQ ID NO: 2037) |
| | Portion 2- | NO: 2012) | |
| | partial | | |
| | tracrRNA | GCACAUUGGUGCU (SEQ ID | GCUACAUGGUGUAGCAUUU |
| | Portion 3 | NO: 2013) | (SEQ ID NO: 2038) |
| | tracrRNA | GCACAUUGGUGC (SEQ ID | GCUACAUGGUGUAGC (SEQ ID |
| | Portion 3- | NO: 2014) | NO: 2039) |
| | partial | | |
| | tracrRNA | AAAAAAGAUCCUUCGGGAU | AAAGUCCGAAAGGACUUUUUUU |
| | Portion 4 | CUUUUUU (SEQ ID NO: 2015) | (SEQ ID NO: 2040) |
| | tracrRNA | AAAAAAGAUCCUUCGGGAU | AAAGUCCGAAAGGACUUU (SEQ |
| | Portion 4- | CUUUUUU (SEQ ID NO: 2016) | ID NO: 2041) |
| | partial | | |
| | tracrRNA | AAAAAAGAUCCUUCGGGAU | AAAGUCCGAAAGGAC (SEQ ID |
| | Portion 4- | C (SEQ ID NO: 2017) | NO: 2042) |
| | without | | |
| | polyT | | |
| | sgRNA V2 | GUUUGAGAGUAGUGUGAgaa | — |
| | sequence | aUCACACUACGAGUUCAAA | |
| | | UAAAGAUUUCUCCAAAUCG | |
| | | CCGGUUUGCCGGCCGCACA | |
| | | UUGGUGCUAAAAAAGAUCC | |
| | | UUCGGGAUCUUUUUU (SEQ | |
| | | ID NO: 2018) | |
| tracrRNA V2 | tracrRNA | AAAGAUUUCUCCAAAUC | — |
| sequences | Portion 1 | (SEQ ID NO: 2019) | |
| | tracrRNA | AAAGAUUUCUCCAAAUC | — |
| | Portion 1- | (SEQ ID NO: 2020) | |
| | partial | | |
| | sgRNA V3 | GUUUGAGAGUAGUGUGAgaa | GUUUGAGAGCCUUGUUAgaaaUA |
| | sequence | aUCACACUACGAGUUCAAA | ACAAGGCGAGUGCAAAUAAGGA |
| | | UAAAGAUUUUUCCAAAUCG | UUAUUCCGAAAUCGUCUAUUGA |
| | | CCGGUUUGCCGGCCUUUUU | CGCUACAUGGUGUAGCAUUUUU |
| | | U (SEQ ID NO: 2021) | U (SEQ ID NO: 2043) |
| tracrRNA V3 | tracrRNA | GCCGGUUUGCCGGCCUUUU | — |
| sequences | Portion 2 | UU (SEQ ID NO: 2022) | |
| | tracrRNA | GCCGGUUUGCCGGCC (SEQ | — |
| | Portion 2- | ID NO: 2023) | |
| | without | | |
| | polyT | | |
| | tracrRNA | — | GCUACAUGGUGUAGCAUUUUUU |
| | Portion 3 | | (SEQ ID NO: 2044) |
| | tracrRNA | — | GCUACAUGGUGUAGCA (SEQ ID |
| | Portion 3- | | NO: 2045) |
| | without | | |
| | polyT | | |
| | sgRNA V4 | GUUUGAGAGUAGUGUGAgaa | — |
| | sequence | aUCACACUACGAGUUCAAA | |
| | | UAAAGAUUUCUCCAAAUCG | |
| | | CCGGUUUGCCGGCCUUUUU | |
| | | U (SEQ ID NO: 2024) | |
| | | OMNI-361 | OMNI-362 |
| | sgRNA V1 | GUUUGAGAGUAGUGUAAgaa | GUUUGAGAGCUGUGUAAgaaaUU |
| | sequence | aUUACACUACGCGUUCAAA | ACACAGCAAGUUCAAAUAAGAU |
| | | UAAAGAUUUAUCCAAAUCG | UUUUCGAAAUCGCCGAUUCAUU |
| | | CCGGGCAACCGGUUGCACA | CGGCCGCACAGGUGUGCGAUCU |
| | | GUGUGUGCGAAAAAGGUCU | UGGAUGCCGUAAGGCAUCUUUU |
| | | CUUCGGAGGCCUUUUUU | UU (SEQ ID NO: 2064) |
| | | (SEQ ID NO: 2046) | |
| crRNA: tracr | crRNA | GUUUGAGAGUAGUGUAA | GUUUGAGAGCUGUGUAA (SEQ ID |
| RNA duplex | (Repeat) | (SEQ ID NO: 2047) | NO: 2065) |
| V1 sequences | Partial | GUUUGAGAGUAGUGU (SEQ | GUUUGAGAGCUGUGU (SEQ ID |
| | crRNA 1 | ID NO: 2048) | NO: 2066) |
| | Partial | GUUUGAGAGUAG (SEQ ID | GUUUGAGAGCUG (SEQ ID NO: |
| | crRNA 2 | NO: 2049) | 2067) |
| | Partial | GUUUGAGAGU (SEQ ID NO: | GUUUGAGAGC (SEQ ID NO: 2068) |
| | crRNA 3 | 2050) | |
| | tracrRNA | UUACACUACGCGUUCAAAU | UUACACAGCAAGUUCAAAU (SEQ |
| | (Antirepeat) | (SEQ ID NO: 2051) | ID NO: 2069) |
| | Partial | ACACUACGCGUUCAAAU | ACACAGCAAGUUCAAAU (SEQ ID |
| | tracrRNA 1 | (SEQ ID NO: 2052) | NO: 2070) |
| | Partial | CUACGCGUUCAAAU (SEQ ID | CAGCAAGUUCAAAU (SEQ ID NO: |
| | tracrRNA 2 | NO: 2053) | 2071) |
| | Partial | ACGCGUUCAAAU (SEQ ID | GCAAGUUCAAAU (SEQ ID NO: |
| | tracrRNA 3 | NO: 2054) | 2072) |
| tracrRNA V1 | tracrRNA | AAAGAUUUAUCCAAAUC | AAGAUUUUUCGAAAUC (SEQ ID |
| sequences | Portion 1 | (SEQ ID NO: 2055) | NO: 2073) |
| | tracrRNA | AAAGAUUUAUCCAAAUC | AAGAUUUUUCGAAAUC (SEQ ID |
| | Portion 1- | (SEQ ID NO: 2056) | NO: 2074) |
| | partial | | |
| | tracrRNA | GCCGGGCAACCGGUU (SEQ | GCCGAUUCAUUCGGC (SEQ ID |
| | Portion 2 | ID NO: 2057) | NO: 2075) |
| | tracrRNA | GCCGGGCAACCGGU (SEQ ID | GCCGAUUCAUUCGGC (SEQ ID |
| | Portion 2- | NO: 2058) | NO: 2076) |
| | partial | | |
| | tracrRNA | GCACAGUGUGUGC (SEQ ID | CGCACAGGUGUGCGAUCUU (SEQ |
| | Portion 3 | NO: 2059) | ID NO: 2077) |
| | tracrRNA | GCACAGUGUGUGC (SEQ ID | CGCACAGGUGUGCG (SEQ ID NO: |
| | Portion 3- | NO: 2060) | 2078) |
| | partial | | |
| | tracrRNA | GAAAAAGGUCUCUUCGGAG | GGAUGCCGUAAGGCAUCUUUUU |
| | Portion 4 | GCCUUUUUU (SEQ ID NO: | U (SEQ ID NO: 2079) |
| | | 2061) | |
| | tracrRNA | GAAAAAGGUCUCUUCGGAG | GGAUGCCGUAAGGCAUCU (SEQ |
| | Portion 4- | GCCUUUUUU (SEQ ID NO: | ID NO: 2080) |
| | partial | 2062) | |
| | tracrRNA | GAAAAAGGUCUCUUCGGAG | GGAUGCCGUAAGGCAUC (SEQ ID |
| | Portion 4- | GCC (SEQ ID NO: 2063) | NO: 2081) |
| | without | | |
| | polyT | | |
| | sgRNA V2 | — | GUUUGAGAGCUGUGUAAgaaaUU |
| | sequence | | ACACAGCAAGUUCAAAUAAGAU |
| | | | UUCUCGAAAUCGCCGAUUCAUU |
| | | | CGGCCGCACAGGUGUGCGAUCU |
| | | | UGGAUGCCGUAAGGCAUCUUUU |
| | | | UU (SEQ ID NO: 2082) |
| tracrRNA V2 | tracrRNA | — | AAGAUUUCUCGAAAUC (SEQ ID |
| sequences | Portion 1 | | NO: 2083) |
| | tracrRNA | — | AAGAUUUCUCGAAAUC (SEQ ID |
| | Portion 1- | | NO: 2084) |
| | partial | | |
| | sgRNA V3 | — | GUUUGAGAGCUGUGUAAgaaaUU |
| | sequence | | ACACAGCAAGUUCAAAUAAGAU |
| | | | UUUUCGAAAUCGCCGAUUCAUU |
| | | | CGGCUUUUUU (SEQ ID NO: 2085) |
| tracrRNA V3 | tracrRNA | — | GCCGAUUCAUUCGGCUUUUUU |
| sequences | Portion 2 | | (SEQ ID NO: 2086) |
| | tracrRNA | — | GCCGAUUCAUUCGGC (SEQ ID |
| | Portion 2- | | NO: 2087) |
| | without | | |
| | polyT | | |
| | sgRNA V4 | — | GUUUGAGAGCUGUGUAAgaaaUU |
| | sequence | | ACACAGCAAGUUCAAAUAAGAU |
| | | | UUCUCGAAAUCGCCGAUUCAUU |
| | | | CGGCUUUUUU (SEQ ID NO: 2088) |
| | | OMNI-363 | OMNI-364 |
| | sgRNA V1 | GUUUGAGAGUCUUGUAAgaa | GUUUGAGAGCUUUGUU AgaaaUA |
| | sequence | aUUACAAGACGAGUGCAAA | ACAAAGCGAGUGCAAAUAAGGU |
| | | UAAGGAUUUAUCCGAAACC | UAAUCCGAAACCGCCAUUUAUG |
| | | GUCGUAAUGACGCCCCAUG | GCUCUGCAUGGUGCAGAAUUUU |
| | | GUGGGGCAUUUAAAAAGAU | UUUAGCCCCUGAUAGGGGCUUU |
| | | UACGCCUAGCGUAGUCUUU | UUU (SEQ ID NO: 2110) |
| | | UUU (SEQ ID NO: 2089) | |
| crRNA: tracr | crRNA | GUUUGAGAGUCUUGUAA | GUUUGAGAGCUUUGUUA (SEQ ID |
| RNA duplex | (Repeat) | (SEQ ID NO: 2090) | NO: 2111) |
| V1 sequences | Partial | GUUUGAGAGUCUUGU (SEQ | GUUUGAGAGCUUUGU (SEQ ID |
| | crRNA 1 | ID NO: 2091) | NO: 2112) |
| | Partial | GUUUGAGAGUCU (SEQ ID | GUUUGAGAGCUU (SEQ ID NO: |
| | crRNA 2 | NO: 2092) | 2113) |
| | Partial | GUUUGAGAGU (SEQ ID NO: | GUUUGAGAGC (SEQ ID NO: 2114) |
| | crRNA 3 | 2093) | |
| | tracrRNA | UUACAAGACGAGUGCAAAU | UAACAAAGCGAGUGCAAAU |
| | (Antirepeat) | (SEQ ID NO: 2094) | (SEQ ID NO: 2115) |
| | Partial | ACAAGACGAGUGCAAAU | ACAAAGCGAGUGCAAAU (SEQ ID |
| | tracrRNA 1 | (SEQ ID NO: 2095) | NO: 2116) |
| | Partial | AGACGAGUGCAAAU (SEQ | AAGCGAGUGCAAAU (SEQ ID NO: |
| | tracrRNA 2 | ID NO: 2096) | 2117) |
| | Partial | ACGAGUGCAAAU (SEQ ID | GCGAGUGCAAAU (SEQ ID NO: |
| | tracrRNA 3 | NO: 2097) | 2118) |
| tracrRNA V1 | tracrRNA | AAGGAUUUAUCCGAAACC | AAGGUUAAUCCGAAACC (SEQ ID |
| sequences | Portion 1 | (SEQ ID NO: 2098) | NO: 2119) |
| | tracrRNA | AAGGAUUUAUCC (SEQ ID | AAGGUUAAUCCGAAACC (SEQ ID |
| | Portion 1- | NO: 2099) | NO: 2120) |
| | partial | | |
| | tracrRNA | GUCGUAAUGAC (SEQ ID NO: | GCCAUUUAUGGC (SEQ ID NO: |
| | Portion 2 | 2100) | 2121) |
| | tracrRNA | GUCGUAAUGAC (SEQ ID NO: | GCCAUUUAUGGC (SEQ ID NO: |
| | Portion 2- | 2101) | 2122) |
| | partial | | |
| | tracrRNA | GCCCCAUGGUGGGGCAUUU | UCUGCAUGGUGCAGAAUUUUUU |
| | Portion 3 | (SEQ ID NO: 2102) | U (SEQ ID NO: 2123) |
| | tracrRNA | GCCCCAUGGUGGGGC (SEQ | UCUGCAUGGUGCAGA (SEQ ID |
| | Portion 3- | ID NO: 2103) | NO: 2124) |
| | partial | | |
| | tracrRNA | AAAAAGAUUACGCCUAGCG | AGCCCCUGAUAGGGGCUUUUUU |
| | Portion 4 | UAGUCUUUUUU (SEQ ID NO: | (SEQ ID NO: 2125) |
| | | 2104) | |
| | tracrRNA | AAAAAGAUUACGCCUAGCG | AGCCCCUGAUAGGGGCU (SEQ ID |
| | Portion 4- | UAGUCUUUUU (SEQ ID NO: | NO: 2126) |
| | partial | 2105) | |
| | tracrRNA | AAAAAGAUUACGCCUAGCG | AGCCCCUGAUAGGGGC (SEQ ID |
| | Portion 4- | UAGUC (SEQ ID NO: 2106) | NO: 2127) |
| | without | | |
| | polyT | | |
| | sgRNA V2 | — | GUUUGAGAGCUUUGUUAgaaaUA |
| | sequence | | ACAAAGCGAGUGCAAAUAAGGU |
| | | | UAAUCCGAAACCGCCAUUUAUG |
| | | | GCUCUGCAUGGUGCAGAAUUUC |
| | | | UUUAGCCCCUGAUAGGGGCUUU |
| | | | UUU (SEQ ID NO: 2128) |
| tracrRNA V2 | tracrRNA | — | UCUGCAUGGUGCAGAAUUUCUU |
| sequences | Portion 3 | | U (SEQ ID NO: 2129) |
| | sgRNA V3 | GUUUGAGAGUCUUGUAAgaa | GUUUGAGAGCUUUGUU AgaaaUA |
| | sequence | aUUACAAGACGAGUGCAAA | ACAAAGCGAGUGCAAAUAAGGU |
| | | UAAGGAUUUAUCCGAAACC | UAAUCCGAAACCGCCAUUUAUG |
| | | GUCGUAAUGACGCCCCAUG | GCUCUGCAUGGUGCAGAAUUUU |
| | | GUGGGGCAUUUUUU (SEQ | UUU (SEQ ID NO: 2130) |
| | | ID NO: 2107) | |
| tracrRNA V3 | tracrRNA | GCCCCAUGGUGGGGCAUUU | — |
| sequences | Portion 3 | UUU (SEQ ID NO: 2108) | |
| | tracrRNA | GCCCCAUGGUGGGGCA (SEQ | UCUGCAUGGUGCAGAA (SEQ ID |
| | Portion 3- | ID NO: 2109) | NO: 2131) |
| | without | | |
| | polyT | | |
| | | OMNI-365 | OMNI-366 |
| | sgRNA V1 | GUUUGAGAGUAGUGUAAgaa | GUUUGAGAGUAGUGUAAgaaaUU |
| | sequence | aUUACACUACGAGUUCAAA | ACACUACGAGUUCAAAUAAAGA |
| | | UAAAGAUUUUUCCAAAUCG | UUCUUCGAAAUCGCGGCUUGUC |
| | | UCGGGUUUCUCCGACAGCA | CGUCAGCACAGGUGUGCUUCCA |
| | | CAGUGUGUGCUUCAAAAGA | AAAGACCUCUUCGGAGGUCUUU |
| | | CCUCUUAUGAGGUCUUUUU | UUU (SEQ ID NO: 2157) |
| | | U (SEQ ID NO: 2132) | |
| crRNA: tracr | crRNA | GUUUGAGAGUAGUGUAA | GUUUGAGAGUAGUGUAA (SEQ |
| RNA duplex | (Repeat) | (SEQ ID NO: 2133) | ID NO: 2158) |
| V1 sequences | Partial | GUUUGAGAGUAGUGU (SEQ | GUUUGAGAGUAGUGU (SEQ ID |
| | crRNA 1 | ID NO: 2134) | NO: 2159) |
| | Partial | GUUUGAGAGUAG (SEQ ID | GUUUGAGAGUAG (SEQ ID NO: |
| | crRNA 2 | NO: 2135) | 2160) |
| | Partial | GUUUGAGAGU (SEQ ID NO: | GUUUGAGAGU (SEQ ID NO: 2161) |
| | crRNA 3 | 2136) | |
| | tracrRNA | UUACACUACGAGUUCAAAU | UUACACUACGAGUUCAAAU (SEQ |
| | (Antirepeat) | (SEQ ID NO: 2137) | ID NO: 2162) |
| | Partial | ACACUACGAGUUCAAAU | ACACUACGAGUUCAAAU (SEQ ID |
| | tracrRNA 1 | (SEQ ID NO: 2138) | NO: 2163) |
| | Partial | CUACGAGUUCAAAU (SEQ ID | CUACGAGUUCAAAU (SEQ ID NO: |
| | tracrRNA 2 | NO: 2139) | 2164) |
| | Partial | ACGAGUUCAAAU (SEQ ID | ACGAGUUCAAAU (SEQ ID NO: |
| | tracrRNA 3 | NO: 2140) | 2165) |
| tracrRNA V1 | tracrRNA | AAAGAUUUUUCCAAAUC | AAAGAUUCUUCGAAAUC (SEQ ID |
| sequences | Portion 1 | (SEQ ID NO: 2141) | NO: 2166) |
| | tracrRNA | AAAGAUUUUUCCAAAUC | AAAGAUUCUUCGAAAUC (SEQ ID |
| | Portion 1- | (SEQ ID NO: 2142) | NO: 2167) |
| | partial | | |
| | tracrRNA | GUCGGGUUUCUCCGAC (SEQ | GCGGCUUGUCCGUC (SEQ ID NO: |
| | Portion 2 | ID NO: 2143) | 2168) |
| | tracrRNA | GUCGGGUUUCUCCGAC (SEQ | GCGGCUUGUCCGU (SEQ ID NO: |
| | Portion 2- | ID NO: 2144) | 2169) |
| | partial | | |
| | tracrRNA | AGCACAGUGUGUGCUUC | AGCACAGGUGUGCUUCC (SEQ ID |
| | Portion 3 | (SEQ ID NO: 2145) | NO: 2170) |
| | tracrRNA | AGCACAGUGUGUGCU (SEQ | AGCACAGGUGUGCU (SEQ ID NO: |
| | Portion 3- | ID NO: 2146) | 2171) |
| | partial | | |
| | tracrRNA | AAAAGACCUCUUAUGAGGU | AAAAGACCUCUUCGGAGGUCUU |
| | Portion 4 | CUUUUUU (SEQ ID NO: 2147) | UUUU (SEQ ID NO: 2172) |
| | tracrRNA | AAAAGACCUCUUAUGAGGU | AAAAGACCUCUUCGGAGGUCUU |
| | Portion 4- | CUUUU (SEQ ID NO: 2148) | UU (SEQ ID NO: 2173) |
| | partial | | |
| | tracrRNA | AAAAGACCUCUUAUGAGGU | AAAAGACCUCUUCGGAGGUC |
| | Portion 4- | C (SEQ ID NO: 2149) | (SEQ ID NO: 2174) |
| | without | | |
| | polyT | | |
| | sgRNA V2 | GUUUGAGAGUAGUGUAAgaa | — |
| | sequence | aUUACACUACGAGUUCAAA | |
| | | UAAAGAUUUCUCCAAAUCG | |
| | | UCGGGUUUCUCCGACAGCA | |
| | | CAGUGUGUGCUUCAAAAGA | |
| | | CCUCUUAUGAGGUCUUUUU | |
| | | U (SEQ ID NO: 2150) | |
| tracrRNA V2 | tracrRNA | AAAGAUUUCUCCAAAUC | — |
| sequences | Portion 1 | (SEQ ID NO: 2151) | |
| | tracrRNA | AAAGAUUUCUCCAAAUC | — |
| | Portion 1- | (SEQ ID NO: 2152) | |
| | partial | | |
| | sgRNA V3 | GUUUGAGAGUAGUGUAAgaa | GUUUGAGAGUAGUGUAAgaaaUU |
| | sequence | aUUACACUACGAGUUCAAA | ACACUACGAGUUCAAAUAAAGA |
| | | UAAAGAUUUUUCCAAAUCG | UUCUUCGAAAUCGCGGCUUGUC |
| | | UCGGGUUUCUCCGACAGCA | CGUCUUUUUU (SEQ ID NO: 2175) |
| | | CAGUGUGUGCUUCUUUUUU | |
| | | (SEQ ID NO: 2153) | |
| tracrRNA V3 | tracrRNA | — | AAAGAUUCUUCGAAAUCGCGGC |
| sequences | Portion 1 | | UUGUCCGUCUUUUUU (SEQ ID |
| | | | NO: 2176) |
| | tracrRNA | — | GAAAUCGCGGCUUGUCCGUCUU |
| | Portion 1- | | UUU (SEQ ID NO: 2177) |
| | partial | | |
| | tracrRNA | — | AAAGAUUCUUCGAAAUCGCGGC |
| | Portion 1- | | UUGUCCGUC (SEQ ID NO: 2178) |
| | without | | |
| | polyT | | |
| | tracrRNA | AGCACAGUGUGUGCUUCUU | — |
| | Portion 3 | UUUU (SEQ ID NO: 2154) | |
| | tracrRNA | AGCACAGUGUGUGCUUC | — |
| | Portion 3- | (SEQ ID NO: 2155) | |
| | without | | |
| | polyT | | |
| | sgRNA V4 | GUUUGAGAGUAGUGUAAgaa | — |
| | sequence | aUUACACUACGAGUUCAAA | |
| | | UAAAGAUUUCUCCAAAUCG | |
| | | UCGGGUUUCUCCGACAGCA | |
| | | CAGUGUGUGCUUCUUUUUU | |
| | | (SEQ ID NO: 2156) | |
| | | OMNI-367 | OMNI-368 |
| | sgRNA V1 | GUUUGAGAGUGGUGUAAgaa | GUUUGAGAGUAAUGUAAgaaaUU |
| | sequence | aUUACACCGCAUGUUCAAA | ACAUCACGAGUUCAAAAAUCAU |
| | | CAAAAACAUGUUCAAACCG | GAUUUAUUCAAAUCGUCUUCUU |
| | | UCCAAUAGGACUUCCAUUG | CGGAAGACCCCACAGCGUGUGG |
| | | UGGAAACAAAGAAGCUUGC | ACUAAAAAACUAGCUUCGGCUA |
| | | CCGUUUGGGUAGGCUUUUU | GUUUUUU (SEQ ID NO: 2204) |
| | | UGUUUUUU (SEQ ID NO: | |
| | | 2179) | |
| crRNA: tracr | crRNA | GUUUGAGAGUGGUGUAA | GUUUGAGAGUAAUGUAA (SEQ |
| RNA duplex | (Repeat) | (SEQ ID NO: 2180) | ID NO: 2205) |
| V1 sequences | Partial | GUUUGAGAGUGGUGU (SEQ | GUUUGAGAGUAAUGU (SEQ ID |
| | crRNA 1 | ID NO: 2181) | NO: 2206) |
| | Partial | GUUUGAGAGUGG (SEQ ID | GUUUGAGAGUAA (SEQ ID NO: |
| | crRNA 2 | NO: 2182) | 2207) |
| | Partial | GUUUGAGAGU (SEQ ID NO: | GUUUGAGAGU (SEQ ID NO: 2208) |
| | crRNA 3 | 2183) | |
| | tracrRNA | UUACACCGCAUGUUCAAAC | UUACAUCACGAGUUCAAA (SEQ |
| | (Antirepeat) | (SEQ ID NO: 2184) | ID NO: 2209) |
| | Partial | ACACCGCAUGUUCAAAC | ACAUCACGAGUUCAAA (SEQ ID |
| | tracrRNA 1 | (SEQ ID NO: 2185) | NO: 2210) |
| | Partial | CCGCAUGUUCAAAC (SEQ ID | UCACGAGUUCAAA (SEQ ID NO: |
| | tracrRNA 2 | NO: 2186) | 2211) |
| | Partial | GCAUGUUCAAAC (SEQ ID | UUACAUCACGAGUUCAAA (SEQ |
| | tracrRNA 3 | NO: 2187) | ID NO: 2212) |
| tracrRNA V1 | tracrRNA | AAAAACAUGUUCAAACCGU | AAUCAUGAUUUAUUCAAAUC |
| sequences | Portion 1 | CCAAUAGGACUUCCAUUGU | (SEQ ID NO: 2213) |
| | | (SEQ ID NO: 2188) | |
| | tracrRNA | AAAAACAUGUUCAAACCGU | AAUCAUGAUUUAUUCAAAUC |
| | Portion 1- | CCAAUAGGAC (SEQ ID NO: | (SEQ ID NO: 2214) |
| | partial | 2189) | |
| | tracrRNA | GGAAACAAAGAAGCUUGCC | GUCUUCUUCGGAAGACC (SEQ ID |
| | Portion 2 | CGUUUGGGUAGGCUUUUUU | NO: 2215) |
| | | GUUUUUU (SEQ ID NO: 2190) | |
| | tracrRNA | GGAAACAAAGAAGCUUGCC | GUCUUCUUCGGAAGAC (SEQ ID |
| | Portion 2- | CGUUUGGGUAGGCUUUUUU | NO: 2216) |
| | partial | GUUUUU (SEQ ID NO: 2191) | |
| | tracrRNA | GGAAACAAAGAAGCUUGCC | — |
| | Portion 2- | CGUUUGGGUAGGCUUUUUU | |
| | without | G (SEQ ID NO: 2192) | |
| | polyT | | |
| | tracrRNA | — | CCACAGCGUGUGGACU (SEQ ID |
| | Portion 3 | | NO: 2217) |
| | tracrRNA | — | CCACAGCGUGUGG (SEQ ID NO: |
| | Portion 3- | | 2218) |
| | partial | | |
| | tracrRNA | — | AAAAAACUAGCUUCGGCUAGUU |
| | Portion 4 | | UUUU (SEQ ID NO: 2219) |
| | tracrRNA | | AAAAAACUAGCUUCGGCUAGUU |
| | Portion 4- | | UUUU (SEQ ID NO: 2220) |
| | partial | | |
| | tracrRNA | — | AAAAAACUAGCUUCGGCUAG |
| | Portion 4- | | (SEQ ID NO: 2221) |
| | without | | |
| | polyT | | |
| | sgRNA V2 | GUUUGAGAGUGGUGUAAgaa | — |
| | sequence | aUUACACCGCAUGUUCAAA | |
| | | CAAAAACAUGUUCAAACCG | |
| | | UCCAAUAGGACUUCCAUUG | |
| | | UGGAAACAAAGAAGCUUGC | |
| | | CCGUUUGGGUAGGCUUCUU | |
| | | UGUUUUUU (SEQ ID NO: | |
| | | 2193) | |
| tracrRNA V2 | tracrRNA | GGAAACAAAGAAGCUUGCC | — |
| sequences | Portion 2 | CGUUUGGGUAGGCUUCUUU | |
| | | GUUUUUU (SEQ ID NO: 2194) | |
| | tracrRNA | GGAAACAAAGAAGCUUGCC | — |
| | Portion 2- | CGUUUGGGUAGGCUUCUUU | |
| | partial | GUUUUU (SEQ ID NO: 2195) | |
| | tracrRNA | GGAAACAAAGAAGCUUGCC | — |
| | Portion 2- | CGUUUGGGUAGGCUUCUUU | |
| | without | G (SEQ ID NO: 2196) | |
| | polyT | | |
| | sgRNA V3 | GUUUGAGAGUGGUGUAAgaa | GUUUGAGAGUAAUGUAAgaaaUU |
| | sequence | aUUACACCGCAUGUUCAAA | ACAUCACGAGUUCAAAAAUCAU |
| | | CAAAAACAUGUUCAAACCG | GAUUUAUUCAAAUCGUCUUCUU |
| | | UCCAAUAGGACUUCCAUUG | CGGAAGACCCCACAGCGUGUGG |
| | | UGGAAACAAAGAAGCUUGC | ACUAAAAAACUAGCUUCGGCUA |
| | | CCGUUUGGGUAGGCUUUUU | GUUUUUUAUUUUUU (SEQ ID NO: |
| | | U (SEQ ID NO: 2197) | 2222) |
| tracrRNA V3 | tracrRNA | AAAAACAUGUUCAAACCGU | — |
| sequences | Portion 1 | CCAAUAGGAC (SEQ ID NO: | |
| | | 2198) | |
| | tracrRNA | UUCCAUUGUGGAAAC (SEQ | — |
| | Portion 2 | ID NO: 2199) | |
| | tracrRNA | UUCCAUUGUGGAA (SEQ ID | — |
| | Portion 2- | NO: 2200) | |
| | partial | | |
| | tracrRNA | AAAGAAGCUUGCCCGUUUG | CCACAGCGUGUGGAC (SEQ ID |
| | Portion 3 | GGUAGGCUUUUUU (SEQ ID | NO: 2223) |
| | | NO: 2201) | |
| | tracrRNA | AAAGAAGCUUGCCCGUUUG | — |
| | Portion 3- | GGUAGGCUUUUUU (SEQ ID | |
| | partial | NO: 2202) | |
| | tracrRNA | AAAGAAGCUUGCCCGUUUG | — |
| | Portion 3- | GGUAGGC (SEQ ID NO: 2203) | |
| | without | | |
| | polyT | | |
| | tracrRNA | — | UAAAAAACUAGCUUCGGCUAGU |
| | Portion 4 | | UUUUUAUUUUUU (SEQ ID NO: |
| | | | 2224) |
| | tracrRNA | — | UAAAAAACUAGCUUCGGCUAGU |
| | Portion 4- | | UUUUUA (SEQ ID NO: 2225) |
| | partial | | |
| | tracrRNA | — | UAAAAAACUAGCUUCGGCUAGU |
| | Portion 4- | | UUUUUA (SEQ ID NO: 2226) |
| | without | | |
| | polyT | | |
| | sgRNA V4 | — | GUUUGAGAGUAAUGUAAgaaaUU |
| | sequence | | ACAUCACGAGUUCAAAAAUCAU |
| | | | GAUUUAUUCAAAUCGUCUUCUU |
| | | | CGGAAGACCCCACAGCGUGUGG |
| | | | ACUAAAGAACUAGCUUCGGCUA |
| | | | GUUCUUUAUUUUUU (SEQ ID NO: |
| | | | 2227) |
| tracrRNA V4 | tracrRNA | — | UAAAGAACUAGCUUCGGCUAGU |
| sequences | Portion 4 | | UCUUUAUUUUUU (SEQ ID NO: |
| | | | 2228) |
| | tracrRNA | — | UAAAGAACUAGCUUCGGCUAGU |
| | Portion 4- | | UCUUUA (SEQ ID NO: 2229) |
| | partial | | |
| | tracrRNA | — | UAAAGAACUAGCUUCGGCUAGU |
| | Portion 4- | | UCUUUA (SEQ ID NO: 2230) |
| | without | | |
| | polyT | | |
| | | OMNI-369 | OMNI-370 |
| | sgRNA V1 | GUUUGAGAGCCUUGUUAgaa | GUUUGAGAGCCUUGUUAgaaaUA |
| | sequence | aUAACAAGGCGGGUGCAAA | ACAAGGCGAGUGCAAAUAAGGU |
| | | UAAGGUUUUUACCGGAAUC | UAAUCCGUAAUCGUCUCUUCGG |
| | | GUCGUUAUGACUCUGCAUG | AGACUCCACAGGGUGUGGAUAA |
| | | GUGCAGAUUUUAAGACUUA | AAGUCAUGAGUAUUCAUGGCUU |
| | | GAAAUAAGUCUUUUUUU | UUUU (SEQ ID NO: 2257) |
| | | (SEQ ID NO: 2231) | |
| crRNA: tracr | crRNA | GUUUGAGAGCCUUGUUA | GUUUGAGAGCCUUGUUA (SEQ ID |
| RNA duplex | (Repeat) | (SEQ ID NO: 2232) | NO: 2258) |
| V1 sequences | Partial | GUUUGAGAGCCUUGU (SEQ | GUUUGAGAGCCUUGU (SEQ ID |
| | crRNA 1 | ID NO: 2233) | NO: 2259) |
| | Partial | GUUUGAGAGCCU (SEQ ID | GUUUGAGAGCCU (SEQ ID NO: |
| | crRNA 2 | NO: 2234) | 2260) |
| | Partial | GUUUGAGAGC (SEQ ID NO: | GUUUGAGAGC (SEQ ID NO: 2261) |
| | crRNA 3 | 2235) | |
| | tracrRNA | UAACAAGGCGGGUGCAAAU | UAACAAGGCGAGUGCAAAU |
| | (Antirepeat) | (SEQ ID NO: 2236) | (SEQ ID NO: 2262) |
| | Partial | ACAAGGCGGGUGCAAAU | ACAAGGCGAGUGCAAAU (SEQ ID |
| | tracrRNA 1 | (SEQ ID NO: 2237) | NO: 2263) |
| | Partial | AGGCGGGUGCAAAU (SEQ | AGGCGAGUGCAAAU (SEQ ID NO: |
| | tracrRNA 2 | ID NO: 2238) | 2264) |
| | Partial | GCGGGUGCAAAU (SEQ ID | GCGAGUGCAAAU (SEQ ID NO: |
| | tracrRNA 3 | NO: 2239) | 2265) |
| tracrRNA V1 | tracrRNA | AAGGUUUUUACCGGAAUC | AAGGUUAAUCCGUAAUC (SEQ ID |
| sequences | Portion 1 | (SEQ ID NO: 2240) | NO: 2266) |
| | tracrRNA | AAGGUUUUUACC (SEQ ID | AAGGUUAAUCCGUAAUC (SEQ ID |
| | Portion 1- | NO: 2241) | NO: 2267) |
| | partial | | |
| | tracrRNA | GUCGUUAUGAC (SEQ ID NO: | GUCUCUUCGGAGAC (SEQ ID NO: |
| | Portion 2 | 2242) | 2268) |
| | tracrRNA | GUCGUUAUGAC (SEQ ID NO: | GUCUCUUCGGAGAC (SEQ ID NO: |
| | Portion 2- | 2243) | 2269) |
| | partial | | |
| | tracrRNA | UCUGCAUGGUGCAGAUUUU | UCCACAGGGUGUGGAU (SEQ ID |
| | Portion 3 | (SEQ ID NO: 2244) | NO: 2270) |
| | tracrRNA | UCUGCAUGGUGCAGA (SEQ | UCCACAGGGUGUGGA (SEQ ID |
| | Portion 3- | ID NO: 2245) | NO: 2271) |
| | partial | | |
| | tracrRNA | AAGACUUAGAAAUAAGUCU | AAAAGUCAUGAGUAUUCAUGGC |
| | Portion 4 | UUUUUU (SEQ ID NO: 2246) | UUUUUU (SEQ ID NO: 2272) |
| | tracrRNA | AAGACUUAGAAAUAAGUCU | AAAAGUCAUGAGUAUUCAUGGC |
| | Portion 4- | U (SEQ ID NO: 2247) | UUUU (SEQ ID NO: 2273) |
| | partial | | |
| | tracrRNA | AAGACUUAGAAAUAAGUC | AAAAGUCAUGAGUAUUCAUGGC |
| | Portion 4- | (SEQ ID NO: 2248) | (SEQ ID NO: 2274) |
| | without | | |
| | polyT | | |
| | sgRNA V2 | GUUUGAGAGCCUUGUUAgaa | — |
| | sequence | aUAACAAGGCGGGUGCAAA | |
| | | UAAGGUUUCUACCGGAAUC | |
| | | GUCGUUAUGACUCUGCAUG | |
| | | GUGCAGAUUCUAAGACUUA | |
| | | GAAAUAAGUCUUUUUUU | |
| | | (SEQ ID NO: 2249) | |
| tracrRNA V2 | tracrRNA | AAGGUUUCUACCGGAAUC | — |
| sequences | Portion 1 | (SEQ ID NO: 2250) | |
| | tracrRNA | AAGGUUUCUACCGGAAUC | |
| | Portion 1- | (SEQ ID NO: 2251) | |
| | partial | | |
| | tracrRNA | UCUGCAUGGUGCAGAUUCU | |
| | Portion 3 | (SEQ ID NO: 2252) | |
| | sgRNA V3 | GUUUGAGAGCCUUGUUAgaa | GUUUGAGAGCCUUGUUAgaaaUA |
| | sequence | aUAACAAGGCGGGUGCAAA | ACAAGGCGAGUGCAAAUAAGGU |
| | | UAAGGUUUUUACCGGAAUC | UAAUCCGUAAUCGUCUCUUCGG |
| | | GUCGUUAUGACUCUGCAUG | AGACUCCACAGGGUGUGGAUUU |
| | | GUGCAGAUUUUUU (SEQ ID | UUU (SEQ ID NO: 2275) |
| | | NO: 2253) | |
| tracrRNA V3 | tracrRNA | UCUGCAUGGUGCAGAUUUU | UCCACAGGGUGUGGAUUUUUU |
| sequences | Portion 3 | UU (SEQ ID NO: 2254) | (SEQ ID NO: 2276) |
| | tracrRNA | UCUGCAUGGUGCAGA (SEQ | UCCACAGGGUGUGGA (SEQ ID |
| | Portion 3- | ID NO: 2255) | NO: 2277) |
| | without | | |
| | polyT | | |
| | sgRNA V4 | GUUUGAGAGCCUUGUUAgaa | — |
| | sequence | aUAACAAGGCGGGUGCAAA | |
| | | UAAGGUUUCUACCGGAAUC | |
| | | GUCGUUAUGACUCUGCAUG | |
| | | GUGCAGAUUUUUU (SEQ ID | |
| | | NO: 2256) | |
| | | OMNI-371 | OMNI-372 |
| | sgRNA V1 | GUUUGAGAGCAGUGUUGgaa | GUUGUGUAUUGCUUUCgaaaGAA |
| | sequence | aCAACACUGCACGUUCAAA | GCAAUACACAAUAAGGAUUAUU |
| | | UAAGCAGAUUGCUACAAGG | CCGUUGUGAAACUUUUAAGGAG |
| | | UUCCCGUAAGGGAAUGACC | GGAGAAUAGAUUUUCUAUUCUC |
| | | AUCUGGUCACAUGAAUAGC | UCGCUUUCUUUUUU (SEQ ID NO: |
| | | CCCCGGCAACGGUGGCUGU | 2305) |
| | | UUUUGUUUUUU (SEQ ID NO: | |
| | | 2278) | |
| crRNA: tracr | crRNA | GUUUGAGAGCAGUGUUG | GUUGUGUAUUGCUUUC (SEQ ID |
| RNA duplex | (Repeat) | (SEQ ID NO: 2279) | NO: 2306) |
| V1 sequences | Partial | GUUUGAGAGCAGUGU (SEQ | GUUGUGUAUUGCUUU (SEQ ID |
| | crRNA 1 | ID NO: 2280) | NO: 2307) |
| | Partial | GUUUGAGAGCAG (SEQ ID | GUUGUGUAUUGC (SEQ ID NO: |
| | crRNA 2 | NO: 2281) | 2308) |
| | Partial | GUUUGAGAGC (SEQ ID NO: | GUUGUGUAUU (SEQ ID NO: 2309) |
| | crRNA 3 | 2282) | |
| | tracrRNA | CAACACUGCACGUUCAAAU | GAAGCAAUACACAAU (SEQ ID |
| | (Antirepeat) | (SEQ ID NO: 2283) | NO: 2310) |
| | Partial | ACACUGCACGUUCAAAU | GAAGCAAUACACAAU (SEQ ID |
| | tracrRNA 1 | (SEQ ID NO: 2284) | NO: 2311) |
| | Partial | CUGCACGUUCAAAU (SEQ ID | GCAAUACACAAU (SEQ ID NO: |
| | tracrRNA 2 | NO: 2285) | 2312) |
| | Partial | GCACGUUCAAAU (SEQ ID | AAUACACAAU (SEQ ID NO: 2313) |
| | tracrRNA 3 | NO: 2286) | |
| tracrRNA V1 | tracrRNA | AAGCAGAUUGCUACAAG | AAGGAUUAUUCC (SEQ ID NO: |
| sequences | Portion 1 | (SEQ ID NO: 2287) | 2314) |
| | tracrRNA | AAGCAGAUUGCU (SEQ ID | AAGGAUUAUUCC (SEQ ID NO: |
| | Portion 1- | NO: 2288) | 2315) |
| | partial | | |
| | tracrRNA | GUUCCCGUAAGGGAAU | GUUGUGAAACUUUU (SEQ ID NO: |
| | Portion 2 | (SEQ ID NO: 2289) | 2316) |
| | tracrRNA | GUUCCCGUAAGGGAAU | GUUGUGAAAC (SEQ ID NO: 2317) |
| | Portion 2- | (SEQ ID NO: 2290) | |
| | partial | | |
| | tracrRNA | GACCAUCUGGUC (SEQ ID | AAGGAGGGAGAAUAGAUUUUCU |
| | Portion 3 | NO: 2291) | AUUCUCUCGCUUUCUUUUUU |
| | | | (SEQ ID NO: 2318) |
| | tracrRNA | GACCAUCUGGUC (SEQ ID | AAGGAGGGAGAAUAGAUUUUCU |
| | Portion 3- | NO: 2292) | AUUCUCUCGCUUU (SEQ ID NO: |
| | partial | | 2319) |
| | tracrRNA | — | AAGGAGGGAGAAUAGAUUUUCU |
| | Portion 3- | | AUUCUCUCGCUUUC (SEQ ID NO: |
| | without | | 2320) |
| | polyT | | |
| | tracrRNA | ACAUGAAUAGCCCCCGGCA | — |
| | Portion 4 | ACGGUGGCUGUUUUUGUUU | |
| | | UUU (SEQ ID NO: 2293) | |
| | tracrRNA | ACAUGAAUAGCCCCCGGCA | — |
| | Portion 4- | ACGGUGGCUGUUUUUGU | |
| | partial | (SEQ ID NO: 2294) | |
| | tracrRNA | ACAUGAAUAGCCCCCGGCA | — |
| | Portion 4- | ACGGUGGCUGUUUUUG | |
| | without | (SEQ ID NO: 2295) | |
| | polyT | | |
| | sgRNA V2 | GUUUGAGAGCAGUGUUGgaa | GUUGUGUAUUGCUUUCgaaaGAA |
| | sequence | aCAACACUGCACGUUCAAA | GCAAUACACAAUAAGGAUUAUU |
| | | UAAGCAGAUUGCUACAAGG | CCGUUGUGAAACUUCUAAGGAG |
| | | UUCCCGUAAGGGAAUGACC | GGAGAAUAGAUCUUCUAUUCUC |
| | | AUCUGGUCACAUGAAUAGC | UCGCUUUCUUUUUU (SEQ ID NO: |
| | | CCCCGGCAACGGUGGCUGU | 2321) |
| | | UUCUGUUUUUU (SEQ ID NO: | |
| | | 2296) | |
| tracrRNA V2 | tracrRNA | — | GUUGUGAAACUUCU (SEQ ID NO: |
| sequences | Portion 2 | | 2322) |
| | tracrRNA | — | AAGGAGGGAGAAUAGAUCUUCU |
| | Portion 3 | | AUUCUCUCGCUUUCUUUUUU |
| | | | (SEQ ID NO: 2323) |
| | tracrRNA | — | AAGGAGGGAGAAUAGAUCUUCU |
| | Portion 3- | | AUUCUCUCGCUUU (SEQ ID NO: |
| | partial | | 2324) |
| | tracrRNA | — | AAGGAGGGAGAAUAGAUCUUCU |
| | Portion 3- | | AUUCUCUCGCUUUC (SEQ ID NO: |
| | without | | 2325) |
| | polyT | | |
| | tracrRNA | ACAUGAAUAGCCCCCGGCA | — |
| | Portion 4 | ACGGUGGCUGUUUCUGUUU | |
| | | UUU (SEQ ID NO: 2297) | |
| | tracrRNA | ACAUGAAUAGCCCCCGGCA | — |
| | Portion 4- | ACGGUGGCUGUUUCUGU | |
| | partial | (SEQ ID NO: 2298) | |
| | tracrRNA | ACAUGAAUAGCCCCCGGCA | — |
| | Portion 4- | ACGGUGGCUGUUUCUG | |
| | without | (SEQ ID NO: 2299) | |
| | polyT | | |
| | sgRNA V3 | GUUUGAGAGCAGUGUUGgaa | GUUGUGUAUUGCUUUCgaaaGAA |
| | sequence | aCAACACUGCACGUUCAAA | GCAAUACACAAUAAGGAUUAUU |
| | | UAAGCAGAUUGCUACAAGG | CCGUUGUGAAACUUUUAAGGAG |
| | | UUCCCGUAAGGGAAUGACC | GGAGAAUAGAUUUUCUAUUCUC |
| | | AUCUGGUCACAUGAAUAGC | UCGCUUUCUUUUAUUCACGUAG |
| | | CCCCGGCAACGGUGGCUGU | CAACACAUUUUUU (SEQ ID NO: |
| | | UUUUU (SEQ ID NO: 2300) | 2326) |
| tracrRNA V3 | tracrRNA | — | GUUGUGAAACUUUUAAGGAGGG |
| sequences | Portion 2 | | AGAAUAGAUUUUCUAUUCUCUC |
| | | | GCUUUCUUUUAUUCACGUAGCA |
| | | | ACACAUUUUUU (SEQ ID NO: |
| | | | 2327) |
| | tracrRNA | — | GUUGUGAAACUUUUAAGGAGGG |
| | Portion 2- | | AGAAUAGAUUUUCUAUUCUCUC |
| | partial | | GCUUUCUUUUAUUCACGUAGC |
| | | | (SEQ ID NO: 2328) |
| | tracrRNA | — | GUUGUGAAACUUUUAAGGAGGG |
| | Portion 2- | | AGAAUAGAUUUUCUAUUCUCUC |
| | without | | GCUUUCUUUUAUUCACGUAGCA |
| | polyT | | ACACA (SEQ ID NO: 2329) |
| | tracrRNA | GACCAUCUGGUCACAU (SEQ | — |
| | Portion 3 | ID NO: 2301) | |
| | tracrRNA | GAAUAGCCCCCGGCAACGG | — |
| | Portion 4 | UGGCUGUUUUUU (SEQ ID | |
| | | NO: 2302) | |
| | tracrRNA | GAAUAGCCCCCGGCAACGG | — |
| | Portion 4- | UGGCUGUUU (SEQ ID NO: | |
| | partial | 2303) | |
| | tracrRNA | GAAUAGCCCCCGGCAACGG | — |
| | Portion 4- | UGGCUG (SEQ ID NO: 2304) | |
| | without | | |
| | polyT | | |
| | sgRNA V4 | — | GUUGUGUAUUGCUUUCgaaaGAA |
| | sequence | | GCAAUACACAAUAAGGAUUAUU |
| | | | CCGUUGUGAAACUUCUAAGGAG |
| | | | GGAGAAUAGAUCUUCUAUUCUC |
| | | | UCGCUUUCUUCUAUUCACGUAG |
| | | | CAACACAUUUUUU (SEQ ID NO: |
| | | | 2330) |
| tracrRNA V4 | tracrRNA | — | GUUGUGAAACUUCUAAGGAGGG |
| sequences | Portion 2 | | AGAAUAGAUCUUCUAUUCUCUC |
| | | | GCUUUCUUCUAUUCACGUAGCA |
| | | | ACACAUUUUUU (SEQ ID NO: |
| | | | 2331) |
| | tracrRNA | — | GUUGUGAAACUUCUAAGGAGGG |
| | Portion 2- | | AGAAUAGAUCUUCUAUUCUCUC |
| | partial | | GCUUUCUUCUAUUCACGUAGC |
| | | | (SEQ ID NO: 2332) |
| | tracrRNA | — | GUUGUGAAACUUCUAAGGAGGG |
| | Portion 2- | | AGAAUAGAUCUUCUAUUCUCUC |
| | without | | GCUUUCUUCUAUUCACGUAGCA |
| | polyT | | ACACA (SEQ ID NO: 2333) |
| | | OMNI-373 | OMNI-375 |
| | sgRNA V1 | GUUUGAGAACCUUGUAAgaa | GUUUGAGAGUAGUGUAAgaaaUU |
| | sequence | aUUACAAGGUGAGUGCAAA | ACACUACACGGUUCAAAUAAAG |
| | | UAAGGAUUCAUCCGAAAUA | AAUUUUCCUAAUCGCCCUUAGG |
| | | GUUUACCCGCAUUGUGCGG | GGCCCACGUUGAUGUGGAUGAA |
| | | UCAAAAAAGACUUGAAAAA | AACUCGCCAGCUAUAAGCGAGU |
| | | GUCUUUUUUU (SEQ ID NO: | UUUUUU (SEQ ID NO: 2350) |
| | | 2334) | |
| crRNA: tracr | crRNA | GUUUGAGAACCUUGUAA | GUUUGAGAGUAGUGUAA (SEQ |
| RNA duplex | (Repeat) | (SEQ ID NO: 2335) | ID NO: 2351) |
| V1 sequences | Partial | GUUUGAGAACCUUGU (SEQ | GUUUGAGAGUAGUGU (SEQ ID |
| | crRNA 1 | ID NO: 2336) | NO: 2352) |
| | Partial | GUUUGAGAACCU (SEQ ID | GUUUGAGAGUAG (SEQ ID NO: |
| | crRNA 2 | NO: 2337) | 2353) |
| | Partial | GUUUGAGAAC (SEQ ID NO: | GUUUGAGAGU (SEQ ID NO: 2354) |
| | crRNA 3 | 2338) | |
| | tracrRNA | UUACAAGGUGAGUGCAAAU | UUACACUACACGGUUCAAAU |
| | (Antirepeat) | (SEQ ID NO: 2339) | (SEQ ID NO: 2355) |
| | Partial | ACAAGGUGAGUGCAAAU | ACACUACACGGUUCAAAU (SEQ |
| | tracrRNA 1 | (SEQ ID NO: 2340) | ID NO: 2356) |
| | Partial | AGGUGAGUGCAAAU (SEQ | CUACACGGUUCAAAU (SEQ ID |
| | tracrRNA 2 | ID NO: 2341) | NO: 2357) |
| | Partial | GUGAGUGCAAAU (SEQ ID | ACACGGUUCAAAU (SEQ ID NO: |
| | tracrRNA 3 | NO: 2342) | 2358) |
| tracrRNA V1 | tracrRNA | AAGGAUUCAUCCGAAAUAG | AAAGAAUUUUCCUAAUCGCCCU |
| sequences | Portion 1 | UUUAC (SEQ ID NO: 2343) | UAGGGGC (SEQ ID NO: 2359) |
| | tracrRNA | AAGGAUUCAUCC (SEQ ID | AAAGAAUUUUCCUAAUCGCCCU |
| | Portion 1- | NO: 2344) | UAGGGGC (SEQ ID NO: 2360) |
| | partial | | |
| | tracrRNA | CCGCAUUGUGCGGUC (SEQ | CCACGUUGAUGUGGAU (SEQ ID |
| | Portion 2 | ID NO: 2345) | NO: 2361) |
| | tracrRNA | CCGCAUUGUGCGG (SEQ ID | CCACGUUGAUGUGG (SEQ ID NO: |
| | Portion 2- | NO: 2346) | 2362) |
| | partial | | |
| | tracrRNA | AAAAAAGACUUGAAAAAGU | GAAAACUCGCCAGCUAUAAGCG |
| | Portion 3 | CUUUUUUU (SEQ ID NO: | AGUUUUUUU (SEQ ID NO: 2363) |
| | | 2347) | |
| | tracrRNA | AAAAAAGACUUGAAAAAGU | GAAAACUCGCCAGCUAUAAGCG |
| | Portion 3- | CUUUUUU (SEQ ID NO: 2348) | AGUUUUU (SEQ ID NO: 2364) |
| | partial | | |
| | tracrRNA | AAAAAAGACUUGAAAAAGU | GAAAACUCGCCAGCUAUAAGCG |
| | Portion 3- | C (SEQ ID NO: 2349) | AG (SEQ ID NO: 2365) |
| | without | | |
| | polyT | | |
| | sgRNA V2 | — | GUUUGAGAGUAGUGUAAgaaaUU |
| | sequence | | ACACUACACGGUUCAAAUAAAG |
| | | | AAUUCUCCUAAUCGCCCUUAGG |
| | | | GGCCCACGUUGAUGUGGAUGAA |
| | | | AACUCGCCAGCUAUAAGCGAGU |
| | | | UUUUUU (SEQ ID NO: 2366) |
| tracrRNA V2 | tracrRNA | — | AAAGAAUUCUCCUAAUCGCCCU |
| sequences | Portion 1 | | UAGGGGC (SEQ ID NO: 2367) |
| | tracrRNA | — | AAAGAAUUCUCCUAAUCGCCCU |
| | Portion 1- | | UAGGGGC (SEQ ID NO: 2368) |
| | partial | | |
| | | OMNI-376 | OMNI-377 |
| | sgRNA V1 | GUUUGAGAGUAGUGUAAgaa | GUUUGAGAGCCUUGUUAgaaaUA |
| | sequence | aUUACACUACGAGUUCAAA | ACAAGGCGAGUGCAAAUAAGGU |
| | | UAAAAAUCUUUUCAAAUCG | UUAUCCGAAAUCGUCUAUUGAC |
| | | UUCGGUUUGACCGUUCGCA | GCCACACGGUGUGGCAUGAAAA |
| | | CAAGUGUUGUGCAUUGAUC | AGUCGCGUAUGCGGCUUUUUUU |
| | | CUUGCUUUUAAGCAAGGAU | (SEQ ID NO: 2391) |
| | | UUUUUU (SEQ ID NO: 2369) | |
| crRNA: tracr | crRNA | GUUUGAGAGUAGUGUAA | GUUUGAGAGCCUUGUUA (SEQ ID |
| RNA duplex | (Repeat) | (SEQ ID NO: 2370) | NO: 2392) |
| V1 sequences | Partial | GUUUGAGAGUAGUGU (SEQ | GUUUGAGAGCCUUGU (SEQ ID |
| | crRNA 1 | ID NO: 2371) | NO: 2393) |
| | Partial | GUUUGAGAGUAG (SEQ ID | GUUUGAGAGCCU (SEQ ID NO: |
| | crRNA 2 | NO: 2372) | 2394) |
| | Partial | GUUUGAGAGU (SEQ ID NO: | GUUUGAGAGC (SEQ ID NO: 2395) |
| | crRNA 3 | 2373) | |
| | tracrRNA | UUACACUACGAGUUCAAAU | UAACAAGGCGAGUGCAAAU |
| | (Antirepeat) | (SEQ ID NO: 2374) | (SEQ ID NO: 2396) |
| | Partial | ACACUACGAGUUCAAAU | ACAAGGCGAGUGCAAAU (SEQ ID |
| | tracrRNA 1 | (SEQ ID NO: 2375) | NO: 2397) |
| | Partial | CUACGAGUUCAAAU (SEQ ID | AGGCGAGUGCAAAU (SEQ ID NO: |
| | tracrRNA 2 | NO: 2376) | 2398) |
| | Partial | ACGAGUUCAAAU (SEQ ID | GCGAGUGCAAAU (SEQ ID NO: |
| | tracrRNA 3 | NO: 2377) | 2399) |
| tracrRNA V1 | tracrRNA | AAAAAUCUUUUCAAAUCGU | AAGGUUUAUCCGAAAUC (SEQ ID |
| sequences | Portion 1 | UCGGUUUGACCGUUC (SEQ | NO: 2400) |
| | | ID NO: 2378) | |
| | tracrRNA | AAAAAUCUUUUCAAAUCGU | AAGGUUUAUCCGAAAUC (SEQ ID |
| | Portion 1- | UCGGUUUGA (SEQ ID NO: | NO: 2401) |
| | partial | 2379) | |
| | tracrRNA | GCACAAGUGUUGUGCAUU | GUCUAUUGAC (SEQ ID NO: 2402) |
| | Portion 2 | (SEQ ID NO: 2380) | |
| | tracrRNA | GCACAAGUGUUGUGC (SEQ | GUCUAUUGAC (SEQ ID NO: 2403) |
| | Portion 2- | ID NO: 2381) | |
| | partial | | |
| | tracrRNA | GAUCCUUGCUUUUAAGCAA | GCCACACGGUGUGGCAU (SEQ ID |
| | Portion 3 | GGAUUUUUUU (SEQ ID NO: | NO: 2404) |
| | | 2382) | |
| | tracrRNA | GAUCCUUGCUUUUAAGCAA | GCCACACGGUGUGGC (SEQ ID |
| | Portion 3- | GGAUU (SEQ ID NO: 2383) | NO: 2405) |
| | partial | | |
| | tracrRNA | GAUCCUUGCUUUUAAGCAA | — |
| | Portion 3- | GGA (SEQ ID NO: 2384) | |
| | without | | |
| | polyT | | |
| | tracrRNA | — | GAAAAAGUCGCGUAUGCGGCUU |
| | Portion 4 | | UUUUU (SEQ ID NO: 2406) |
| | tracrRNA | | GAAAAAGUCGCGUAUGCGGCUU |
| | Portion 4- | | UUUU (SEQ ID NO: 2407) |
| | partial | | |
| | tracrRNA | — | GAAAAAGUCGCGUAUGCGGC |
| | Portion 4- | | (SEQ ID NO: 2408) |
| | without | | |
| | polyT | | |
| | sgRNA V2 | GUUUGAGAGUAGUGUAAgaa | — |
| | sequence | aUUACACUACGAGUUCAAA | |
| | | UAAAAAUCUUCUCAAAUCG | |
| | | UUCGGUUUGACCGUUCGCA | |
| | | CAAGUGUUGUGCAUUGAUC | |
| | | CUUGCUUUCAAGCAAGGAU | |
| | | UUUUUU (SEQ ID NO: 2385) | |
| tracrRNA V2 | tracrRNA | AAAAAUCUUCUCAAAUCGU | — |
| sequences | Portion 1 | UCGGUUUGACCGUUC (SEQ | |
| | | ID NO: 2386) | |
| | tracrRNA | AAAAAUCUUCUCAAAUCGU | — |
| | Portion 1- | UCGGUUUGA (SEQ ID NO: | |
| | partial | 2387) | |
| | tracrRNA | GAUCCUUGCUUUCAAGCAA | — |
| | Portion 3 | GGAUUUUUUU (SEQ ID NO: | |
| | | 2388) | |
| | tracrRNA | GAUCCUUGCUUUCAAGCAA | — |
| | Portion 3- | GGAUU (SEQ ID NO: 2389) | |
| | partial | | |
| | tracrRNA | GAUCCUUGCUUUCAAGCAA | — |
| | Portion 3- | GGA (SEQ ID NO: 2390) | |
| | without | | |
| | polyT | | |
| | sgRNA V3 | — | GUUUGAGAGCCUUGUUAgaaaUA |
| | sequence | | ACAAGGCGAGUGCAAAUAAGGU |
| | | | UUAUCCGAAAUCGUCUAUUGAC |
| | | | GCCACACGGUGUGGCAUUUUUU |
| | | | (SEQ ID NO: 2409) |
| tracrRNA V3 | tracrRNA | — | GCCACACGGUGUGGCAUUUUUU |
| sequences | Portion 3 | | (SEQ ID NO: 2410) |
| | tracrRNA | — | GCCACACGGUGUGGCA (SEQ ID |
| | Portion 3- | | NO: 2411) |
| | without | | |
| | polyT | | |
| | | OMNI-378 | OMNI-380 |
| | sgRNA V1 | GUUUUGGGGCAGCGUCAgaa | GUUGGGAAUUGCUUUCAAAgaaa |
| | sequence | aUGACGCUGCGAGUCAAAA | GGAGAAAGACUUUUCUCAAUAA |
| | | UAAAGGUUUACCCUAAUUG | GGCUAUAAGCCGAAGAUGUCUA |
| | | CCCGUUUCGGGUUUCGCUU | ACAGCCUGCGUUGUCGUGGGAA |
| | | AAGCGAAAUUUUUU (SEQ | CUGUGGAAACCCUGCAUCUUUA |
| | | ID NO: 2412) | GAAGCAGGGUUUUUU (SEQ ID |
| | | | NO: 2437) |
| crRNA: tracr | crRNA | GUUUUGGGGCAGCGUCA | GUUGGGAAUUGCUUUCAAA |
| RNA duplex | (Repeat) | (SEQ ID NO: 2413) | (SEQ ID NO: 2438) |
| V1 sequences | Partial | GUUUUGGGGCAGCGU (SEQ | GUUGGGAAUUGCUUU (SEQ ID |
| | crRNA 1 | ID NO: 2414) | NO: 2439) |
| | Partial | GUUUUGGGGCAG (SEQ ID | GUUGGGAAUUGC (SEQ ID NO: |
| | crRNA 2 | NO: 2415) | 2440) |
| | Partial | GUUUUGGGGC (SEQ ID NO: | GUUGGGAAUU (SEQ ID NO: 2441) |
| | crRNA 3 | 2416) | |
| | tracrRNA | UGACGCUGCGAGUCAAAAU | GGAGAAAGACUUUUCUCAAU |
| | (Antirepeat) | (SEQ ID NO: 2417) | (SEQ ID NO: 2442) |
| | Partial | ACGCUGCGAGUCAAAAU | AAAGACUUUUCUCAAU (SEQ ID |
| | tracrRNA 1 | (SEQ ID NO: 2418) | NO: 2443) |
| | Partial | CUGCGAGUCAAAAU (SEQ ID | GACUUUUCUCAAU (SEQ ID NO: |
| | tracrRNA 2 | NO: 2419) | 2444) |
| | Partial | GCGAGUCAAAAU (SEQ ID | UUUUCUCAAU (SEQ ID NO: 2445) |
| | tracrRNA 3 | NO: 2420) | |
| tracrRNA V1 | tracrRNA | AAAGGUUUACCCUAAUU | AAGGCUAUAAGCCGAAGAUGUC |
| sequences | Portion 1 | (SEQ ID NO: 2421) | UA (SEQ ID NO: 2446) |
| | tracrRNA | AAAGGUUUACCCU (SEQ ID | AAGGCUAUAAGCC (SEQ ID NO: |
| | Portion 1- | NO: 2422) | 2447) |
| | partial | | |
| | tracrRNA | GCCCGUUUCGGGU (SEQ ID | ACAGCCUGCGUUGUCGUGGGAA |
| | Portion 2 | NO: 2423) | CUGU (SEQ ID NO: 2448) |
| | tracrRNA | GCCCGUUUCGGGU (SEQ ID | ACAGCCUGCGUUGUCGUGGGAA |
| | Portion 2- | NO: 2424) | CUGU (SEQ ID NO: 2449) |
| | partial | | |
| | tracrRNA | UUCGCUUAAGCGAAAUUUU | GGAAACCCUGCAUCUUUAGAAG |
| | Portion 3 | UU (SEQ ID NO: 2425) | CAGGGUUUUUU (SEQ ID NO: |
| | | | 2450) |
| | tracrRNA | UUCGCUUAAGCGAA (SEQ ID | GGAAACCCUGCAUCUUUAGAAG |
| | Portion 3- | NO: 2426) | CAGGGUUUUU (SEQ ID NO: 2451) |
| | partial | | |
| | tracrRNA | UUCGCUUAAGCGAAA (SEQ | GGAAACCCUGCAUCUUUAGAAG |
| | Portion 3- | ID NO: 2427) | CAGGG (SEQ ID NO: 2452) |
| | without | | |
| | polyT | | |
| | sgRNA V2 | GUUCUGGGGCAGCGUCAgaa | |
| | sequence | aUGACGCUGCGAGUCAGAA | |
| | | UAAAGGUUUACCCUAAUUG | |
| | | CCCGUUUCGGGUUUCGCUU | |
| | | AAGCGAAAUUUUUU (SEQ | |
| | | ID NO: 2428) | |
| crRNA: tracr | crRNA | GUUCUGGGGCAGCGUCA | — |
| RNA duplex | (Repeat) | (SEQ ID NO: 2429) | |
| V2 sequences | Partial | GUUCUGGGGCAGCGU (SEQ | — |
| | crRNA 1 | ID NO: 2430) | |
| | Partial | GUUCUGGGGCAG (SEQ ID | |
| | crRNA 2 | NO: 2431) | |
| | Partial | GUUCUGGGGC (SEQ ID NO: | — |
| | crRNA 3 | 2432) | |
| | tracrRNA 1 | UGACGCUGCGAGUCAGAAU | — |
| | (Antirepeat) | (SEQ ID NO: 2433) | |
| | Partial | ACGCUGCGAGUCAGAAU | — |
| | tracrRNA 1 | (SEQ ID NO: 2434) | |
| | Partial | CUGCGAGUCAGAAU (SEQ ID | — |
| | tracrRNA 2 | NO: 2435) | |
| | Partial | GCGAGUCAGAAU (SEQ ID | — |
| | tracrRNA 3 | NO: 2436) | |
| | | OMNI-381 | OMNI-382 |
| | sgRNA V1 | GUCUAGGAGUAGUGCUGgaa | GUUGUGACUUGCUUGAgaaaUCA |
| | sequence | aCGGCACUACAAGUCUAGA | AGCAAGUCACAAUAAGGAUUAU |
| | | UAAAAAUUUAUUCAAAGCA | UCCGUUGUGAAAACAUUAGGGC |
| | | CCGUUUAGGCGGUACCCCG | GGGGCAACUCGCCUUUUUUU |
| | | UUGUGGGGACAUAAUUCAG | (SEQ ID NO: 2469) |
| | | CCCGAAUAUUUGGUUAUUC | |
| | | GGGCUGAAUUAUUUUUU | |
| | | (SEQ ID NO: 2453) | |
| crRNA: tracr | crRNA | GUCUAGGAGUAGUGCUG | GUUGUGACUUGCUUGA (SEQ ID |
| RNA duplex | (Repeat) | (SEQ ID NO: 2454) | NO: 2470) |
| V1 sequences | Partial | GUCUAGGAGUAGUGC (SEQ | GUUGUGACUUGCUUG (SEQ ID |
| | crRNA 1 | ID NO: 2455) | NO: 2471) |
| | Partial | GUCUAGGAGUAG (SEQ ID | GUUGUGACUUGC (SEQ ID NO: |
| | crRNA 2 | NO: 2456) | 2472) |
| | Partial | GUCUAGGAGU (SEQ ID NO: | GUUGUGACUU (SEQ ID NO: 2473) |
| | crRNA 3 | 2457) | |
| | tracrRNA | CGGCACUACAAGUCUAGAU | UCAAGCAAGUCACAAU (SEQ ID |
| | (Antirepeat) | (SEQ ID NO: 2458) | NO: 2474) |
| | Partial | GCACUACAAGUCUAGAU | CAAGCAAGUCACAAU (SEQ ID |
| | tracrRNA 1 | (SEQ ID NO: 2459) | NO: 2475) |
| | Partial | CUACAAGUCUAGAU (SEQ ID | GCAAGUCACAAU (SEQ ID NO: |
| | tracrRNA 2 | NO: 2460) | 2476) |
| | Partial | ACAAGUCUAGAU (SEQ ID | AAGUCACAAU (SEQ ID NO: 2477) |
| | tracrRNA 3 | NO: 2461) | |
| tracrRNA V1 | tracrRNA | AAAAAUUUAUUCAAAGCAC | AAGGAUUAUUCCGU (SEQ ID NO: |
| sequences | Portion 1 | CGUUUAGGCGGUA (SEQ ID | 2478) |
| | | NO: 2462) | |
| | tracrRNA | AAAAAUUUAUUCAAAGCAC | AAGGAUUAUUCC (SEQ ID NO: |
| | Portion 1- | CGUUUAGGCGGU (SEQ ID | 2479) |
| | partial | NO: 2463) | |
| | tracrRNA | CCCCGUUGUGGGGAC (SEQ | UGUGAAAACAUU (SEQ ID NO: |
| | Portion 2 | ID NO: 2464) | 2480) |
| | tracrRNA | CCCCGUUGUGGGG (SEQ ID | UGUGAAAACA (SEQ ID NO: 2481) |
| | Portion 2- | NO: 2465) | |
| | partial | | |
| | tracrRNA | AUAAUUCAGCCCGAAUAUU | AGGGCGGGGCAACUCGCCUUUU |
| | Portion 3 | UGGUUAUUCGGGCUGAAUU | UUU (SEQ ID NO: 2482) |
| | | AUUUUUU (SEQ ID NO: 2466) | |
| | tracrRNA | AUAAUUCAGCCCGAAUAUU | AGGGCGGGGCAACUCGCCUU |
| | Portion 3- | UGGUUAUUCGGGCUGAAUU | (SEQ ID NO: 2483) |
| | partial | AU (SEQ ID NO: 2467) | |
| | tracrRNA | AUAAUUCAGCCCGAAUAUU | AGGGCGGGGCAACUCGCC (SEQ |
| | Portion 3- | UGGUUAUUCGGGCUGAAUU | ID NO: 2484) |
| | without | A (SEQ ID NO: 2468) | |
| | polyT | | |
| | | OMNI-383 | OMNI-384 |
| | sgRNA V1 | GUUGUGAUUUGCUUACgaaa | GUUUUGGCGCAGUGUCGgaaaCG |
| | sequence | UAAGCAAAUCACAAUAAGG | AUACUGCGAGUCAAAAUAACGG |
| | | AUUAUUCCGUUGUGAAAAC | CUUUUGCCUAAAAUGUCUCGAU |
| | | AUUCAAGGCGGGGCAACUC | UCAAUCGAGACGCUCCGGAGGG |
| | | GCCUUUUUUU (SEQ ID NO: | AGCUAUCUGACUUGCAUAAGGC |
| | | 2485) | AUCCAAGCGUUCUUGGAUGCCU |
| | | | UUUUU (SEQ ID NO: 2501) |
| crRNA: tracr | crRNA | GUUGUGAUUUGCUUAC | GUUUUGGCGCAGUGUCG (SEQ ID |
| RNA duplex | (Repeat) | (SEQ ID NO: 2486) | NO: 2502) |
| V1 sequences | Partial | GUUGUGAUUUGCUUA (SEQ | GUUUUGGCGCAGUGU (SEQ ID |
| | crRNA 1 | ID NO: 2487) | NO: 2503) |
| | Partial | GUUGUGAUUUGC (SEQ ID | GUUUUGGCGCAG (SEQ ID NO: |
| | crRNA 2 | NO: 2488) | 2504) |
| | Partial | GUUGUGAUUU (SEQ ID NO: | GUUUUGGCGC (SEQ ID NO: 2505) |
| | crRNA 3 | 2489) | |
| | tracrRNA | UAAGCAAAUCACAAU (SEQ | CGAUACUGCGAGUCAAAAU (SEQ |
| | (Antirepeat) | ID NO: 2490) | ID NO: 2506) |
| | Partial | UAAGCAAAUCACAAU (SEQ | AUACUGCGAGUCAAAAU (SEQ ID |
| | tracrRNA 1 | ID NO: 2491) | NO: 2507) |
| | Partial | GCAAAUCACAAU (SEQ ID | CUGCGAGUCAAAAU (SEQ ID NO: |
| | tracrRNA 2 | NO: 2492) | 2508) |
| | Partial | AAAUCACAAU (SEQ ID NO: | GCGAGUCAAAAU (SEQ ID NO: |
| | tracrRNA 3 | 2493) | 2509) |
| tracrRNA V1 | tracrRNA | AAGGAUUAUUCCGU (SEQ | AACGGCUUUUGCCUAAAAU (SEQ |
| sequences | Portion 1 | ID NO: 2494) | ID NO: 2510) |
| | tracrRNA | AAGGAUUAUUCC (SEQ ID | AACGGCUUUUGCC (SEQ ID NO: |
| | Portion 1- | NO: 2495) | 2511) |
| | partial | | |
| | tracrRNA | UGUGAAAACAUUC (SEQ ID | GUCUCGAUUCAAUCGAGAC (SEQ |
| | Portion 2 | NO: 2496) | ID NO: 2512) |
| | tracrRNA | UGUGAAAACA (SEQ ID NO: | GUCUCGAUUCAAUCGAGAC (SEQ |
| | Portion 2- | 2497) | ID NO: 2513) |
| | partial | | |
| | tracrRNA | AAGGCGGGGCAACUCGCCU | GCUCCGGAGGGAGCUAUCUGAC |
| | Portion 3 | UUUUUU (SEQ ID NO: 2498) | UUGCAU (SEQ ID NO: 2514) |
| | tracrRNA | AAGGCGGGGCAACUCGCCU | GCUCCGGAGGGAGC (SEQ ID NO: |
| | Portion 3- | U (SEQ ID NO: 2499) | 2515) |
| | partial | | |
| | tracrRNA | AAGGCGGGGCAACUCGCC | — |
| | Portion 3- | (SEQ ID NO: 2500) | |
| | without | | |
| | polyT | | |
| | tracrRNA | — | AAGGCAUCCAAGCGUUCUUGGA |
| | Portion 4 | | UGCCUUUUUU (SEQ ID NO: 2516) |
| | tracrRNA | — | AAGGCAUCCAAGCGUUCUUGGA |
| | Portion 4- | | UGCCUU (SEQ ID NO: 2517) |
| | partial | | |
| | tracrRNA | — | AAGGCAUCCAAGCGUUCUUGGA |
| | Portion 4- | | UGCC (SEQ ID NO: 2518) |
| | without | | |
| | polyT | | |
| | sgRNA V2 | — | GUUCUGGCGCAGUGUCGgaaaCGA |
| | sequence | | UACUGCGAGUCAGAAUAACGGC |
| | | | UUCUGCCUAAAAUGUCUCGAUU |
| | | | CAAUCGAGACGCUCCGGAGGGA |
| | | | GCUAUCUGACUUGCAUAAGGCA |
| | | | UCCAAGCGUUCUUGGAUGCCUU |
| | | | UUUU (SEQ ID NO: 2519) |
| crRNA: tracr | crRNA | — | GUUCUGGCGCAGUGUCG (SEQ ID |
| RNA duplex | (Repeat) | | NO: 2520) |
| V2 sequences | Partial | — | GUUCUGGCGCAGUGU (SEQ ID |
| | crRNA 1 | | NO: 2521) |
| | Partial | — | GUUCUGGCGCAG (SEQ ID NO: |
| | crRNA 2 | | 2522) |
| | Partial | — | GUUCUGGCGC (SEQ ID NO: 2523) |
| | crRNA 3 | | |
| | tracrRNA | — | CGAUACUGCGAGUCAGAAU (SEQ |
| | (Antirepeat) | | ID NO: 2524) |
| | Partial | — | AUACUGCGAGUCAGAAU (SEQ ID |
| | tracrRNA 1 | | NO: 2525) |
| | Partial | — | CUGCGAGUCAGAAU (SEQ ID NO: |
| | tracrRNA 2 | | 2526) |
| | Partial | — | GCGAGUCAGAAU (SEQ ID NO: |
| | tracrRNA 3 | | 2527) |
| tracrRNA V2 | tracrRNA | — | AACGGCUUCUGCCUAAAAU (SEQ |
| sequences | Portion 1 | | ID NO: 2528) |
| | tracrRNA | — | AACGGCUUCUGCC (SEQ ID NO: |
| | Portion 1- | | 2529) |
| | partial | | |
| | sgRNA V3 | — | GUUUUGGCGCAGUGUCGgaaaCG |
| | sequence | | AUACUGCGAGUCAAAAUAACGG |
| | | | CUUUUGCCUAAAAUGUCUCGAU |
| | | | UCAAUCGAGACUUUUUU (SEQ ID |
| | | | NO: 2530) |
| tracrRNA V3 | tracrRNA | — | AACGGCUUUUGCCU (SEQ ID NO: |
| sequences | Portion 1 | | 2531) |
| | tracrRNA | — | AAAAUGUCUCGAUUCAAUCGAG |
| | Portion 2 | | ACUUUUUU (SEQ ID NO: 2532) |
| | tracrRNA | — | AAAAUGUCUCGAUUCAAUCGAG |
| | Portion 2- | | ACUUUUU (SEQ ID NO: 2533) |
| | partial | | |
| | tracrRNA | — | AAAAUGUCUCGAUUCAAUCGAG |
| | Portion 2- | | AC (SEQ ID NO: 2534) |
| | without | | |
| | polyT | | |
| | sgRNA V4 | — | GUUCUGGCGCAGUGUCGgaaaCGA |
| | sequence | | UACUGCGAGUCAGAAUAACGGC |
| | | | UUCUGCCUAAAAUGUCUCGAUU |
| | | | CAAUCGAGACUUUUUU (SEQ ID |
| | | | NO: 2535) |
| tracrRNA V4 | tracrRNA | — | AACGGCUUCUGCCU (SEQ ID NO: |
| sequences | Portion 1 | | 2536) |
| | | OMNI-385 | OMNI-386 |
| | sgRNA V1 | GUUGUGAUUAGCUAGAgaaa | GUUGUGAUUUGCUUUCgaaaGAA |
| | sequence | UCUAGCUAAUCACAAUAAG | GCAAAUCACAAUAAGGAUUAUU |
| | | GAUUAUUCCGUUGUGAAAA | CCGUUGUGAAAACAUUAGGUUG |
| | | CAUUACGGGUGGGGUGACU | CUCUCGUCCUUUAACGGGAGCA |
| | | CACCCUUUUUU (SEQ ID NO: | UUUUUUUGUUUUUU (SEQ ID NO: |
| | | 2537) | 2553) |
| | crRNA | GUUGUGAUUAGCUAGA | GUUGUGAUUUGCUUUC (SEQ ID |
| | (Repeat) | (SEQ ID NO: 2538) | NO: 2554) |
| crRNA: tracr | Partial | GUUGUGAUUAGCUAG (SEQ | GUUGUGAUUUGCUUU (SEQ ID |
| RNA duplex | crRNA 1 | ID NO: 2539) | NO: 2555) |
| V1 sequences | Partial | GUUGUGAUUAGC (SEQ ID | GUUGUGAUUUGC (SEQ ID NO: |
| | crRNA 2 | NO: 2540) | 2556) |
| | Partial | GUUGUGAUUA (SEQ ID NO: | GUUGUGAUUU (SEQ ID NO: 2557) |
| | crRNA 3 | 2541) | |
| | tracrRNA | UCUAGCUAAUCACAAU | GAAGCAAAUCACAAU (SEQ ID |
| | (Antirepeat) | (SEQ ID NO: 2542) | NO: 2558) |
| | Partial | CUAGCUAAUCACAAU (SEQ | GAAGCAAAUCACAAU (SEQ ID |
| | tracrRNA 1 | ID NO: 2543) | NO: 2559) |
| | Partial | GCUAAUCACAAU (SEQ ID | GCAAAUCACAAU (SEQ ID NO: |
| | tracrRNA 2 | NO: 2544) | 2560) |
| | Partial | UAAUCACAAU (SEQ ID NO: | AAAUCACAAU (SEQ ID NO: 2561) |
| | tracrRNA 3 | 2545) | |
| tracrRNA V1 | tracrRNA | AAGGAUUAUUCC (SEQ ID | AAGGAUUAUUCCGUUGU (SEQ ID |
| sequences | Portion 1 | NO: 2546) | NO: 2562) |
| | tracrRNA | AAGGAUUAUUCC (SEQ ID | AAGGAUUAUUCC (SEQ ID NO: |
| | Portion 1- | NO: 2547) | 2563) |
| | partial | | |
| | tracrRNA | GUUGUGAAAACAUUAC | GAAAACAUUAGGUUGCUCUCGU |
| | Portion 2 | (SEQ ID NO: 2548) | CCUUUAACGGGAGCAUUUUUUU |
| | | | GUUUUUU (SEQ ID NO: 2564) |
| | tracrRNA | GUUGUGAAAACAUUAC | GAAAACAUUAGGUUGCUCUCGU |
| | Portion 2- | (SEQ ID NO: 2549) | CCUUUAACGGGAGCAUUUUUUU |
| | partial | | GUUUUU (SEQ ID NO: 2565) |
| | tracrRNA | — | GAAAACAUUAGGUUGCUCUCGU |
| | Portion 2- | | CCUUUAACGGGAGCAUUUUUUU |
| | without | | G (SEQ ID NO: 2566) |
| | polyT | | |
| | tracrRNA | GGGUGGGGUGACUCACCCU | — |
| | Portion 3 | UUUUU (SEQ ID NO: 2550) | |
| | tracrRNA | GGGUGGGGUGACUCACCC | — |
| | Portion 3- | (SEQ ID NO: 2551) | |
| | partial | | |
| | tracrRNA | GGGUGGGGUGACUCACCC | — |
| | Portion 3- | (SEQ ID NO: 2552) | |
| | without | | |
| | polyT | | |
| | sgRNA V2 | — | GUUGUGAUUUGCUUUCgaaaGAA |
| | sequence | | GCAAAUCACAAUAAGGAUUAUU |
| | | | CCGUUGUGAAAACAUUGGGUUG |
| | | | CUCUCGUCCUUUAACGGGAGCA |
| | | | UUUCUUUGUUUUUU (SEQ ID NO: |
| | | | 2567) |
| tracrRNA V2 | tracrRNA | — | GAAAACAUUGGGUUGCUCUCGU |
| sequences | Portion 1 | | CCUUUAACGGGAGCAUUUCUUU |
| | | | GUUUUUU (SEQ ID NO: 2568) |
| | tracrRNA | — | GAAAACAUUGGGUUGCUCUCGU |
| | Portion 1- | | CCUUUAACGGGAGCAUUUCUUU |
| | partial | | GUUUUU (SEQ ID NO: 2569) |
| | tracrRNA | — | GAAAACAUUGGGUUGCUCUCGU |
| | Portion 1- | | CCUUUAACGGGAGCAUUUCUUU |
| | without | | G (SEQ ID NO: 2570) |
| | polyT | | |
| | sgRNA V3 | — | GUUGUGAUUUGCUUUCgaaaGAA |
| | sequence | | GCAAAUCACAAUAAGGAUUAUU |
| | | | CCGUUGUGAAAACAUUAGGUUG |
| | | | CUCUCGUCCUUUAACGGGAGCA |
| | | | UUUUUUUGUUUUAUGGGAUUAG |
| | | | UUUUUU (SEQ ID NO: 2571) |
| tracrRNA V3 | tracrRNA | — | AAGGAUUAUUCCGUUGUGAAAA |
| sequences | Portion 1 | | CAUUAGGUUGCUCUCGUCCUUU |
| | | | AACGGGAGCAUUUUUUUGUUUU |
| | | | AUGGGAUUAGUUUUUU (SEQ ID |
| | | | NO: 2572) |
| | tracrRNA | — | AAGGAUUAUUCCGUUGUGAAAA |
| | Portion 1- | | CAUUAGGUUGCUCUCGUCCUUU |
| | partial | | AACGGGAGCAUUUUUUUGUUUU |
| | | | AUGGGAUUAGUUUUU (SEQ ID |
| | | | NO: 2573) |
| | tracrRNA | — | AAGGAUUAUUCCGUUGUGAAAA |
| | Portion 1- | | CAUUAGGUUGCUCUCGUCCUUU |
| | without | | AACGGGAGCAUUUUUUUGUUUU |
| | polyT | | AUGGGAUUAG (SEQ ID NO: 2574) |

TABLE 3
OMNI PAM Sequences showing activity for each tested sgRNA

| | | | Additional | Additional | Additional | Additional |
|---|---|---|---|---|---|---|
| Name | Relaxed PAM | Strict PAM | PAM # 1 | PAM # 2 | PAM # 3 | PAM # 4 |
| OMNI-263 | NNNVCCNR | NNNRCCNR | NNNRCMNN | Not listed | Not listed | Not listed |
| OMNI-264 | NRRNANNN | NRRNAANN | NGGYANNN | NRRYANNN | Not listed | Not listed |
| OMNI-266 | NNNNCDMA | NNNNCTAA | NNNCCTMA | NNNNCWMA | Not listed | Not listed |
| OMNI-268 | NNNNNCNN | NVRMNCNN | NNRAACNN | NNRNNCNN | Not listed | Not listed |
| OMNI-269 | NNNNCMDN | NDDNCMAN | NNNNCMNN | Not listed | Not listed | Not listed |
| OMNI-271 | NDNCHTNN | NNNCHTNN | Not listed | Not listed | Not listed | Not listed |
| OMNI-274 | NNRDGNMN | NNRKGNMN | NNRKGHNN | Not listed | Not listed | Not listed |
| OMNI-275 | NNRCAANN | BRRCAAGN | CNVCAANN | CNRCAAGN | Not listed | Not listed |
| OMNI-276 | NNDGCHNN | NNRGCYNR | NNRKCHNN | KNRGCCNN | NNGGCHNN | Not listed |
| OMNI-278 | NDHAANNN | NAYAAWNN | NDYANNNN | NRYANNNN | Not listed | Not listed |
| OMNI-279 | NNAANNNN | NNAARGNN | NNAAVNNN | Not listed | Not listed | Not listed |
| OMNI-280 | NNVGGNNN | NNRGGGNN | NNRGNNNN | NNGGGNNN | Not listed | Not listed |
| OMNI-281 | NNGRNNNN | NNGRVNNN | NNGAVNNN | Not listed | Not listed | Not listed |
| OMNI-283 | NNNRTMNN | CNNRTMNN | NNNRTANN | Not listed | Not listed | Not listed |
| OMNI-284 | NNNNRTWN | NNRMATWN | NNNNATAN | NNNNATWN | Not listed | Not listed |
| OMNI-286 | NNNNCNAN | NNNNCMAA | NNNNCNNN | Not listed | Not listed | Not listed |
| OMNI-287 | NNNNRTAA | NNNNRTAN | Not listed | Not listed | Not listed | Not listed |
| OMNI-288 | NNNYMAAN | NNNTAAAN | NNNYAAAN | Not listed | Not listed | Not listed |
| OMNI-290 | NNNNGHNN | NNNNGMAA | NNNNGMDN | Not listed | Not listed | Not listed |
| OMNI-291 | NNNNCVKA | NNNNCVTA | NNNNCNKN | NNNNCNTA | Not listed | Not listed |
| OMNI-293 | NNNNCNAN | NNWNCNAC | NNNNCNNN | Not listed | Not listed | Not listed |
| OMNI-294 | NNNNGYDA | NNNNGYRA | NNNNGYDN | Not listed | Not listed | Not listed |
| OMNI-295 | NNRNCDNN | Not listed | Not listed | Not listed | Not listed | Not listed |
| OMNI-296 | NNNNGNHN | NNNNGHAA | NNNNGNAN | Not listed | Not listed | Not listed |
| OMNI-297 | NNNNAYRN | NNNNAYRA | NNNNVYAN | NNNNAYAN | Not listed | Not listed |
| OMNI-298 | NNRNGCNN | NNRGGCNA | NNNNGYNN | NNNNGCNN | Not listed | Not listed |
| OMNI-299 | NNNNRYAA | NNNVGTAA | NNNNRYHN | NNNNRYAN | Not listed | Not listed |
| OMNI-300 | NNNNGMAA | NNASGMAA | NNNNGNAN | NNNNGVAN | Not listed | Not listed |
| OMNI-301 | NNNNGYKW | NNNNGTTA | NNNNGYNN | Not listed | Not listed | Not listed |
| OMNI-302 | NNNNCHWA | NNNNCMWA | NNNNCDNN | NNNNCNNN | Not listed | Not listed |
| OMNI-303 | NNNNCATR | NNNHCATA | NNNNCATA | NNNCCATA | NNNNCAYA | Not listed |
| OMNI-304 | NNNGVGNN | NNRGGGNN | NNRGRGNN | Not listed | Not listed | Not listed |
| OMNI-305 | NNNNGRAN | NNNNGRAA | NNNNGRDN | Not listed | Not listed | Not listed |
| OMNI-307 | NRDAATNN | NRGAATNN | NNGAATNN | Not listed | Not listed | Not listed |
| OMNI-308 | NNNNRYAT | NNNNRYAN | Not listed | Not listed | Not listed | Not listed |
| OMNI-309 | NNNNGHAA | NNNNGAAA | NNNNRNDN | NNNNRWDN | Not listed | Not listed |
| OMNI-310 | NNGYAARN | NGGCAARN | NNGCAANN | Not listed | Not listed | Not listed |
| OMNI-311 | NNANGNNN | NNAMGMNN | Not listed | Not listed | Not listed | Not listed |
| OMNI-312 | NNVNRYNN | NNRNRTNN | NNNRTANN | Not listed | Not listed | Not listed |
| OMNI-313 | NNRNRYNN | NNRNRTKN | NNRNRTNN | Not listed | Not listed | Not listed |
| OMNI-314 | NNNNCABN | NNNNCABA | NNNNCANN | NNNNCATN | Not listed | Not listed |
| OMNI-315 | NNSCGNHN | NNSCGNCN | NNCCNNNN | Not listed | Not listed | Not listed |
| OMNI-316 | NNNNCNYN | NNNNCMYN | NNNNCHYN | NNNNCHCN | Not listed | Not listed |
| OMNI-317 | NNNNGAAD | NNNGGAAA | NNNNGRAD | Not listed | Not listed | Not listed |
| OMNI-318 | NNNCCYNN | NNNCCCNN | NNNNMCNN | NNNNCCNN | Not listed | Not listed |
| OMNI-319 | NNAARAAN | NYAARAAN | NNANVDNN | NNAARDNN | Not listed | Not listed |
| OMNI-320 | NNNNCMAW | NNANCAAW | NNNNCHAY | NNNNCAAY | NNNNCNAN | Not listed |
| OMNI-321 | NNNNRYAR | NNNSGTAA | NNNNVTAN | NNNNRTAA | NNNVRTAR | NNNVGTAR |
| OMNI-322 | NNNNGNNC | NNNSGMAC | NNNNRNNC | Not listed | Not listed | Not listed |
| OMNI-323 | NRRNGGNN | NGGNGGNN | Not listed | Not listed | Not listed | Not listed |
| OMNI-324 | NNRCMNNN | Not listed | Not listed | Not listed | Not listed | Not listed |
| OMNI-325 | NNBCRNNN | NNNRCAGW | NNNNCAAC | Not listed | Not listed | Not listed |
| OMNI-326 | NNNNCAGN | NNNRCAGA | NNNNCMRN | NNNRCAGW | Not listed | Not listed |
| OMNI-327 | NRVWWGNN | NRCAWGDN | NNVWWGN | NNSAWGNN | Not listed | Not listed |
| OMNI-329 | NVRATTNN | NRAATTAN | NVRAYTNN | NRRATTNN | NNRATTNN | Not listed |
| OMNI-330 | NNNNNHAA | NNNNNYAA | Not listed | Not listed | Not listed | Not listed |
| OMNI-331 | NNNNGWDA | NNNSGTKA | NNNSGWDA | NNNNGNDA | Not listed | Not listed |
| OMNI-332 | NRRNNCVN | NRRNMCVN | NRGCMCRN | NRRNNCRN | NNGYACRN | Not listed |
| OMNI-333 | NNRCVCNN | NRRCACYN | NNRCRCNN | NRRCACNN | Not listed | Not listed |
| OMNI-334 | NNANANNN | NSAMANNN | NNAMANNN | Not listed | Not listed | Not listed |
| OMNI-336 | NVTAYTNN | NGGNNNNN | NGGNGNNN | Not listed | Not listed | Not listed |
| OMNI-337 | NNGWMRNN | NNGAAANN | NNGAANNN | NNGAMANN | Not listed | Not listed |
| OMNI-338 | NRNRNCNN | NRWANCNN | NRTAYNNN | Not listed | Not listed | Not listed |
| OMNI-339 | NAGBNNNN | NAGYNNNN | NRNAHCNN | Not listed | Not listed | Not listed |
| OMNI-340 | NAGBNNNN | NAGYNNNN | Not listed | Not listed | Not listed | Not listed |
| OMNI-341 | NRNAANNN | NVYAATNN | Not listed | Not listed | Not listed | Not listed |
| OMNI-342 | NVMADCNN | NRYAANNN | Not listed | Not listed | Not listed | Not listed |
| OMNI-343 | NNHADCNN | NNNCCCNN | Not listed | Not listed | Not listed | Not listed |
| OMNI-344 | NVTAACNN | NRTAACNN | NNNCCCNN | Not listed | Not listed | Not listed |
| OMNI-345 | NVTAAYNN | NRTAAYNN | NRTANYNN | NRTAACNN | Not listed | Not listed |
| OMNI-346 | NRTANNNN | YGTANNNN | NCCNNSMN | NCCNNNVN | BCSMCSSB | BNSMNSSB |
| OMNI-347 | NNTANNNN | NVTANNNN | Not listed | Not listed | Not listed | Not listed |
| OMNI-348 | NNGNNNNN | NNGNMANN | NNGHNHNN | NCGHVANN | Not listed | Not listed |
| OMNI-349 | NRNAAANN | NRMAAANN | NVNMAANN | NACAAANN | Not listed | Not listed |
| OMNI-350 | NNTANNNN | NNTAHNNN | Not listed | Not listed | Not listed | Not listed |
| OMNI-351 | NNGRYNNN | NNGRCANN | NNGRYANN | NNGGYANN | Not listed | Not listed |
| OMNI-352 | NGGNNNNN | Not listed | Not listed | Not listed | Not listed | Not listed |
| OMNI-353 | NRHAATNN | Not listed | Not listed | Not listed | Not listed | Not listed |
| OMNI-354 | NVNACNNN | NVWACANN | NRHACANN | Not listed | Not listed | Not listed |
| OMNI-356 | NNNRAANN | NNYRAANN | NNYAAANN | NNNNANNN | NNNRANNN | |
| OMNI-357 | NGGNNNNN | Not listed | Not listed | Not listed | Not listed | Not listed |
| OMNI-358 | NNRACYNN | NNRACTNN | Not listed | Not listed | Not listed | Not listed |
| OMNI-359 | NRHRAANN | NRMAAANN | NRHAAANN | Not listed | Not listed | Not listed |
| OMNI-360 | NNNAACNN | NRNAACNN | Not listed | Not listed | Not listed | Not listed |
| OMNI-361 | NRTAYNNN | NGTACNNN | NGTAYNNN | Not listed | Not listed | Not listed |
| OMNI-362 | NVHARKNN | NRYARKNN | NRYARTNN | Not listed | Not listed | Not listed |
| OMNI-363 | NRNARWNN | NRNAAWNN | NRNAATNN | Not listed | Not listed | Not listed |
| OMNI-364 | NRNACBNN | NRNACTNN | Not listed | Not listed | Not listed | Not listed |
| OMNI-365 | NNNACNNN | NRHACNNN | NNHACNNN | Not listed | Not listed | Not listed |
| OMNI-366 | NVTAMNNN | NVTAMMNN | NVTACNNN | Not listed | Not listed | Not listed |
| OMNI-367 | NRTADMNN | NGTADCCN | NRTANMNN | NRTARNNN | Not listed | Not listed |
| OMNI-368 | NNRACYNN | NNRACTTN | NNNACTNN | Not listed | Not listed | Not listed |
| OMNI-369 | NNNAACNN | NRNAACNN | NNNADCNN | Not listed | Not listed | Not listed |
| OMNI-370 | NRNRAANN | NRNAAANN | NNNAAANN | Not listed | Not listed | Not listed |
| OMNI-371 | NRWRTARN | NGWATAGN | NRNRTANN | NRYATARN | NNNATANN | Not listed |
| OMNI-372 | NNAAATNN | NNAAANNN | Not listed | Not listed | Not listed | Not listed |
| OMNI-373 | NDRACNNN | NNRACNNN | NRRACNNN | Not listed | Not listed | Not listed |
| OMNI-375 | NNAAYNYN | NNAACNY | Not listed | Not listed | Not listed | Not listed |
| OMNI-376 | NNYAANNN | Not listed | Not listed | Not listed | Not listed | Not listed |
| OMNI-377 | NRNVCCNN | NRNACCNN | NRDACCNN | Not listed | Not listed | Not listed |
| OMNI-378 | NNGNNNNN | NNGNMRNN | NNGNNANN | Not listed | Not listed | Not listed |
| OMNI-380 | NRGCCCNN | NRGCCCRN | NNGCCCNN | Not listed | Not listed | Not listed |
| OMNI-381 | NNNGMTTN | NNTGATTN | NNNGATDN | Not listed | Not listed | Not listed |
| OMNI-382 | NVAYAANN | NAATAANN | NRAYAANN | NNAYAANN | Not listed | Not listed |
| OMNI-383 | NNRRVCNN | NNRRACNN | Not listed | Not listed | Not listed | Not listed |
| OMNI-384 | NRRCNNNN | NAGCNNNN | Not listed | Not listed | Not listed | Not listed |
| OMNI-385 | NNAAMGNN | NNAAAGNN | Not listed | Not listed | Not listed | Not listed |
| OMNI-386 | NRRYAANN | NRAYAANN | NRACAANN | Not listed | Not listed | Not listed |

TABLE 4
Plasmids used in assays

| Plasmid | Purpose | Elements | Example |
|---|---|---|---|
| pET9a | Expressing OMNI | T7 promoter HA Tag-Linker- | pET9a-OMNI-263 |
| | polypeptide in the | OMNI ORF (Human optimized)- | (SEQ ID NO: 2575) |
| | bacterial system | SV40 NLS-8XHisTag -T7 | |
| | | terminator | |
| pbShuttle | Expressing OMNI | U6 promotor - T7promoter - T2 | pShuttle Guide-T2-OMNI-264 V1 |
| Guide T2 | sgRNA in the bacterial | spacer sgRNA scaffold - T7 | (SEQ ID NO: 2576) |
| | system | terminator | |
| pbPOS T2 | Bacterial/TXTL | T2 protospacer - 8N PAM | pbPOS T2 library |
| library | depletion assay | library - chloramphenicol | (SEQ ID NO: 2577) |
| | | acetyltransferase | |
| pmOMNI | Expressing OMNI | CMV promoter - Kozak - SV40 | pmOMNI-OMNI-263 |
| | polypeptide in the | NLS - OMNI ORF (human | (SEQ ID NO: 2578) |
| | human cell system | optimized) - HA - SV40 NLS - | |
| | | P2A - mCherry - bGH poly(A) | |
| | | signal | |

TABLE 4
Appendix - Details of construct elements

| Element | Protein Sequence | DNA sequence |
|---|---|---|
| HA Tag | SEQ ID NO: 2579 | SEQ ID NO: 2583 |
| NLS | SEQ ID NO: 2580 | SEQ ID NO: 2584 |
| P2A | SEQ ID NO: 2581 | SEQ ID NO: 2585 |
| mCherry | SEQ ID NO: 2582 | SEQ ID NO: 2586 |

TABLE 5
Nuclease activity in endogenous context in mammalian cells
Nuclease activity in endogenous context in mammalian cells: OMNI nucleases were
expressed in mammalian cell system (HeLa) by DNA transfection together with an sgRNA
expressing plasmid. Cell lysates were used for site specific genomic DNA amplification
and NGS. The percentage of indels was measured and analyzed to determine the editing
level. Each sgRNA is composed of the tracrRNA (see Table 2) and the spacer detailed
here. The spacer 3′ genomic sequence contains the expected PAM relevant for each OMNI
nuclease. All tests were performed in triplicates. OMNI nuclease only (no guide)
transfected cells served as a negative control.

| | Gene | Corresponding | | Max Activity | |
|---|---|---|---|---|---|
| Nuclease | target | spacer name | Spacer sequence | Mean | PAM |
| OMNI-266 | hTRAC | hTRAC_s160_ | CCCUGCCGUGUA | 51% | GACTCTAA |
| | | 22 bp_II | CCAGCUGAGA | | |
| | | | (SEQ ID NO: 2588) | | |
| OMNI-268 | hSAMD9 | hSAMD9L_g83_ | AAAACAGAACAC | 1% | CAAAACAC |
| | | alt_22 bp_II | CAAAAAAAUC | | |
| | | | (SEQ ID NO: 2590) | | |
| | hCXCR4 | hCXCR4_S40_ | GAUAAGGCCAAC | 1% | TGAAACTG |
| | | 22 bp_II | CAUGAUGUGC | | |
| | | | (SEQ ID NO: 2589) | | |
| OMNI-269 | hTGFBi | hTGFBi_g20_ | CAGCACGGGUAA | 11% | CTGGCCAG |
| | | 22 bp_II | GCCGAGCCGC | | |
| | | | (SEQ ID NO: 2783) | | |
| | hELANE | hELANE_g145_ | CCCCUCGGAGUC | 12% | GTGACCAT |
| | | 22 bp_II | UACACCCGCU | | |
| | | | (SEQ ID NO: 2593) | | |
| | hELANE | hELANE_g146_ | UGUUAUGGUCAC | 19% | GACTCCGA |
| | | 22 bp_II | AGCGGGUGUA | | |
| | | | (SEQ ID NO: 2594) | | |
| | hELANE | hELANE_g62_ | GUGUCAAGCCCC | 21% | GGGACAGA |
| | | 22 bp_II | AGAGGCCACA | | |
| | | | (SEQ ID NO: 2595) | | |
| | hSAMD9 | hSAMD9L_g147_ | UUCCAAGGAACA | 29% | GGTGCCAA |
| | | alt_22 bp_II | AAGAGCCUUU | | |
| | | | (SEQ ID NO: 2601) | | |
| | hTRAC | hTRAC_S72_ | UUCCAGAAGACA | 43% | CAGCCCAG |
| | | 22 bp_II | CCUUCUUCCC | | |
| | | | (SEQ ID NO: 2598) | | |
| | hLRRK2 | hLRRK2_g13_ | AUAUCACUUUCU | 44% | TCAGCAAG |
| | | alt_22 bp_II | UCAUCCAGUA | | |
| | | | (SEQ ID NO: 2597) | | |
| | hELANE | hELANE_g136_ | CCACCCGCUCCC | 54% | GCAGCAAC |
| | | 22 bp_II | AGCCCGGACU | | |
| | | | (SEQ ID NO: 2592) | | |
| | hLRRK2 | hLRRK2_g11_ | UCUAGGGAGGUA | 73% | AAAACAAG |
| | | alt_22 bp_II | ACGGUAAAAG | | |
| | | | (SEQ ID NO: 2596) | | |
| OMNI-274 | hTRAC | hTRAC_S25_ | CUCAGCUGGUAC | 26% | CAGGGTTC |
| | | 22 bp_II | ACGGCAGGGU | | |
| | | | (SEQ ID NO: 2603) | | |
| OMNI-278 | hPDCD1 | hPDCD1_S6_ | CAUGAGCGUGGU | 1% | CGCAATGA |
| | | 22 bp_II | CAGGGCCCGG | | |
| | | | (SEQ ID NO: 2606) | | |
| | hCXCR4 | hCXCR4_S55_ | CACGAGGAUGGC | 2% | CACACCGG |
| | | 22 bp_II | AAGAGACCCA | | |
| | | | (SEQ ID NO: 2605) | | |
| | hTRAC | hTRAC_S88_ | GCUGAGAGACUC | 3% | GACAAGTC |
| | | 22 bp_II | UAAAUCCAGU | | |
| | | | (SEQ ID NO: 2607) | | |
| OMNI-279 | hCXCR4 | hCXCR4_s79_ | GGCUUCAAGCAA | 13% | GTAAAGAG |
| | | 22 bp II | CUUGUAGUGG | | |
| | | | (SEQ ID NO: 2608) | | |
| OMNI-280 | hTRAC | hTRAC_S25_ | CUCAGCUGGUAC | 2% | CAGGGTTC |
| | | 22 bp_II | ACGGCAGGGU | | |
| | | | (SEQ ID NO: 2603) | | |
| | hTRAC | hTRAC_s119_ | ACCAAAGCUGCC | 3% | CTGGGGAA |
| | | 22 bp_II | CUUACCUGGG | | |
| | | | (SEQ ID NO: 2611) | | |
| | hPDCD1 | hPDCD1_S30_ | UUCCGUGUCACA | 4% | ACGGGCGT |
| | | 22 bp_II | CAACUGCCCA | | |
| | | | (SEQ ID NO: 2610) | | |
| | hPDCD1 | hPDCD1_S29_ | AAGAGAGCCUGC | 4% | CAGGGTGA |
| | | 22 bp_II | GGGCAGAGCU | | |
| | | | (SEQ ID NO: 2609) | | |
| OMNI-281 | hELANE | hELANE_g145_ | CCCCUCGGAGUC | 15% | GTGACCAT |
| | | 22 bp_II | UACACCCGCU | | |
| | | | (SEQ ID NO: 2593) | | |
| | hELANE | hELANE_g147_ | CAGUCCGGGCUG | 19% | GGGAGCAG |
| | | 22 bp_II | GGAGCGGGUG | | |
| | | | (SEQ ID NO: 2621) | | |
| | hLRRK2 | hLRRK2_g16_ | AUCACCUUGCUG | 24% | AAGAAAGT |
| | | alt_22 bp_II | AUACUGGAUG | | |
| | | | (SEQ ID NO: 2625) | | |
| | hLRRK2 | hLRRK2_g10_ | AAAAUCACCUUG | 24% | ATGAAGAA |
| | | alt_22 bp_II | CUGAUACUGG | | |
| | | | (SEQ ID NO: 2624) | | |
| | hSERP | hSERP_g147_ | CUGACCAUCGAC | 29% | CTGAAGCT |
| | | 22 bp_II | GAGAAAGGGA | | |
| | | | (SEQ ID NO: 2628) | | |
| | hELANE | hELANE_g62_ | GUGUCAAGCCCC | 57% | GGGACAGA |
| | | 22 bp_II | AGAGGCCACA | | |
| | | | (SEQ ID NO: 2595) | | |
| | hTRAC | hTRAC_S35_ | GACCCUGCCGUG | 63% | GAGACTCT |
| | | 22 bp_II | UACCAGCUGA | | |
| | | | (SEQ ID NO: 2617) | | |
| | hLRRK2 | hLRRK2_g18_ | GGUUCUAGGGAG | 63% | AAGAAAAC |
| | | alt_22 bp_II | GUAACGGUAA | | |
| | | | (SEQ ID NO: 2627) | | |
| | hCXCR4 | hCXCR4_s89_ | AAGAAAGCUAGG | 65% | TGGAAATC |
| | | 22 bp_II | GCCUCGGUGA | | |
| | | | (SEQ ID NO: 2613) | | |
| | hTRAC | hTRAC_S41_ | GCCUUCAACAAC | 86% | CAGAAGAC |
| | | 22 bp_II | AGCAUUAUUC | | |
| | | | (SEQ ID NO: 2618) | | |
| OMNI-286 | hSAMD9 | hSAMD9L_g147_ | UUCCAAGGAACA | 44% | GGTGCCAA |
| | | alt_22 bp_II | AAGAGCCUUU | | |
| | | | (SEQ ID NO: 2601) | | |
| | hCXCR4 | hCXCR4_S36_ | GUAAGGCAGCCA | 55% | AAAGCCAG |
| | | 22 bp_II | ACAGGCGAAG | | |
| | | | (SEQ ID NO: 2599) | | |
| OMNI-290 | hCXCR4 | hCXCR4_S113_ | GGAAGAAAGCUA | 48% | GATGGAAA |
| | | 22 bp_II | GGGCCUCGGU | | |
| | | | (SEQ ID NO: 2633) | | |
| OMNI-291 | hSERP | hSERP_g115_ | CCUUUCUCGUCG | 25% | CAGCCTTA |
| | | 22 bp_II | AUGGUCAGCA | | |
| | | | (SEQ ID NO: 2645) | | |
| | hLRRK2 | hLRRK2_g22_ | CAUCCAGUAUCA | 30% | TTTACCTA |
| | | alt_22 bp_II | GCAAGGUGAU | | |
| | | | (SEQ ID NO: 2643) | | |
| | hCXCR4 | hCXCR4_S117_ | ACGGAAACAGGG | 30% | GAGTCATA |
| | | 22 bp_II | UUCCUUCAUG | | |
| | | | (SEQ ID NO: 2635) | | |
| | hELANE | hELANE_g124_ | UGCAGCAACAGG | 46% | AGACCCTA |
| | | 22 bp_II | CACCGUGGCU | | |
| | | | (SEQ ID NO: 2641) | | |
| | hB2M | hB2M_S25_ | UUUCAUCCAUCC | 46% | TTGACTTA |
| | | 22 bp_II | GACAUUGAAG | | |
| | | | (SEQ ID NO: 2639) | | |
| | hTIGIT | hTIGIT_S28_ | CAGCUGUCUGAU | 58% | TCTGCCTA |
| | | 22 bp_II | GCCUCCUGUC | | |
| | | | (SEQ ID NO: 2646) | | |
| | hB2M | hB2M_s89_ | CAAAGUCACAUG | 83% | CAGGCATA |
| | | 22 bp_II | GUUCACACGG | | |
| | | | (SEQ ID NO: 2640) | | |
| | hPDCD1 | hPDCD1_S123_ | CAUUCCGCUAGG | 91% | GTGGCATA |
| | | 22 bp_II | AAAGACAAUG | | |
| | | | (SEQ ID NO: 2637) | | |
| OMNI-293 | hELANE | hELANE_g149_ | GAGUCCCAGCUG | 35% | ATTCCCAG |
| | | alt_22 bp_II | CGGGAAUGGG | | |
| | | | (SEQ ID NO: 2654) | | |
| | hCXCR4 | hCXCR4_S36_ | GUAAGGCAGCCA | 38% | AAAGCCAG |
| | | 22 bp_II | ACAGGCGAAG | | |
| | | | (SEQ ID NO: 2599) | | |
| | hELANE | hELANE_g122_ | AGCUGCGGGAAU | 50% | GGACCCAG |
| | | alt_22 bp_II | GGGAUUCCCA | | |
| | | | (SEQ ID NO: 2651) | | |
| | hTRAC | hTRAC_S56_ | AUCCAGAACCCU | 82% | TGTACCAG |
| | | 22 bp_II | GACCCUGCCG | | |
| | | | (SEQ ID NO: 2650) | | |
| OMNI-294 | hPDCD1 | hPDCD1_S121_ | ACCCUCCACCAU | 43% | CAGCGCAT |
| | | 22 bp_II | GAGCCCGGGU | | |
| | | | (SEQ ID NO: 2657) | | |
| OMNI-295 | hCXCR4 | hCXCR4_S38_ | AUCCACUUGUGC | 1% | CAAACTCA |
| | | 22 bp_II | ACAGUGUUCU | | |
| | | | (SEQ ID NO: 2658) | | |
| | hTRAC | hTRAC_S20_ | AGCGUCAUGAGC | 8% | CGGCCACT |
| | | 22 bp_II | AGAUUAAACC | | |
| | | | (SEQ ID NO: 2659) | | |
| OMNI-296 | hCXCR4 | hCXCR4_S113_ | GGAAGAAAGCUA | 1% | GATGGAAA |
| | | 22 bp_II | GGGCCUCGGU | | |
| | | | (SEQ ID NO: 2633) | | |
| OMNI-297 | hCXCR4 | hCXCR4_S122_ | AUAAACACGAGG | 32% | ACCCACAC |
| | | 22 bp_II | AUGGCAAGAG | | |
| | | | (SEQ ID NO: 2660) | | |
| OMNI-298 | hELANE | hELANE_g147_ | CAGUCCGGGCUG | 10% | GGGAGCAG |
| | | 22 bp_II | GGAGCGGGUG | | |
| | | | (SEQ ID NO: 2621) | | |
| | hELANE | hELANE_g148_ | GGCUGGGUCCUG | 12% | TCCCGCAG |
| | | alt_22 bp_II | GGAAUCCCAU | | |
| | | | (SEQ ID NO: 2669) | | |
| | hCXCR4 | hCXCR4_S69_ | AGGAUGACCAAU | 13% | CAATGCCA |
| | | 22 bp_II | CCAUUGCCCA | | |
| | | | (SEQ ID NO: 2664) | | |
| | hPDCD1 | hPDCD1_S88_ | UUCUCCAACACA | 38% | TCGTGCTA |
| | | 22 bp_II | UCGGAGAGCU | | |
| | | | (SEQ ID NO: 2666) | | |
| | hCXCR4 | hCXCR4_S22_ | UUCCCUUCUGGG | 47% | CGTGGCAA |
| | | 22 bp_II | CAGUUGAUGC | | |
| | | | (SEQ ID NO: 2663) | | |
| | hPDCD1 | hPDCD1_S79_ | UGCUCGUGGUGA | 53% | CAACGCCA |
| | | 22 bp_II | CCGAAGGGGA | | |
| | | | (SEQ ID NO: 2665) | | |
| OMNI-299 | hPDCD1 | hPDCD1_S121_ | ACCCUCCACCAU | 10% | CAGCGCAT |
| | | 22 bp_II | GAGCCCGGGU | | |
| | | | (SEQ ID NO: 2657) | | |
| OMNI-300 | hCXCR4 | hCXCR4_S113_ | GGAAGAAAGCUA | 45% | GATGGAAA |
| | | 22 bp_II | GGGCCUCGGU | | |
| | | | (SEQ ID NO: 2633) | | |
| OMNI-302 | hCXCR4 | hCXCR4_S36_ | GUAAGGCAGCCA | 1% | AAAGCCAG |
| | | 22 bp_II | ACAGGCGAAG | | |
| | | | (SEQ ID NO: 2599) | | |
| | hTRAC | hTRAC_S56_ | AUCCAGAACCCU | 5% | TGTACCAG |
| | | 22 bp_II | GACCCUGCCG | | |
| | | | (SEQ ID NO: 2650) | | |
| OMNI-303 | hCXCR4 | hCXCR4_S117_ | ACGGAAACAGGG | 27% | GAGTCATA |
| | | 22 bp_II | UUCCUUCAUG | | |
| | | | (SEQ ID NO: 2635) | | |
| OMNI-304 | hTRAC | hTRAC_s139_ | UCUCAGCUGGUA | 1% | TCAGGGTT |
| | | 22 bp_II | CACGGCAGGG | | |
| | | | (SEQ ID NO: 2681) | | |
| | hTRAC | hTRAC_s140_ | ACACCUUCUUCC | 2% | TAAGGGCA |
| | | 22 bp_II | CCAGCCCAGG | | |
| | | | (SEQ ID NO: 2682) | | |
| | hPDCD1 | hPDCD1_S124_ | CACCUGCAGCUU | 2% | TCGGAGAG |
| | | 22 bp_II | CUCCAACACA | | |
| | | | (SEQ ID NO: 2680) | | |
| | hCXCR4 | hCXCR4_S118_ | UUCAGACAACAG | 2% | CTAGGGCC |
| | | 22 bp_II | UGGAAGAAAG | | |
| | | | (SEQ ID NO: 2679) | | |
| OMNI-308 | hCXCR4 | hCXCR4_S120_ | AGUUCCCAAAGU | 14% | CACGGCAT |
| | | 22 bp_II | ACCAGUUUGC | | |
| | | | (SEQ ID NO: 2683) | | |
| | hTIGIT | hTIGIT_S27_ | GGCUACUUUCAG | 15% | GGCCACAT |
| | | 22 bp_II | UGGCAGAAGA | | |
| | | | (SEQ ID NO: 2693) | | |
| | hTRAC | hTRAC_s136_ | UGGCCUGGAGCA | 35% | CTTTGCAT |
| | | 22 bp_II | ACAAAUCUGA | | |
| | | | (SEQ ID NO: 2686) | | |
| | hLRRK2 | hLRRK2_g15_ | UACCAUUACCUC | 69% | TAAAGTAT |
| | | 22 bp_II | CCUAGAACCA | | |
| | | | (SEQ ID NO: 2784) | | |
| | hCTLA4 | hCTLA4_S17_ | UGCUGUGGUACU | 74% | CGAGGCAT |
| | | 22 bp_II | GGCCAGCAGC | | |
| | | | (SEQ ID NO: 2689) | | |
| | hCXCR4 | hCXCR4_S121_ | CAUGGGUUACCA | 83% | AGAAGCAT |
| | | 22 bp_II | GAAGAAACUG | | |
| | | | (SEQ ID NO: 2684) | | |
| | hTIGIT | hTIGIT_S26_ | CCCUUGAUUCUA | 84% | GGAGGCAT |
| | | 22 bp_II | GGCAGAGACA | | |
| | | | (SEQ ID NO: 2692) | | |
| | hCTLA4 | hCTLA4_S16_ | CAGUACCACAGC | 86% | ACGTGCAT |
| | | 22 bp_II | AGGCUGGGCC | | |
| | | | (SEQ ID NO: 2688) | | |
| | hTRAC | hTRAC_s135_ | GUGUCACAAAGU | 92% | ATGTGTAT |
| | | 22 bp_II | AAGGAUUCUG | | |
| | | | (SEQ ID NO: 2673) | | |
| OMNI-309 | hTRAC | hTRAC_s95_ | GAUAUCCAGAAC | 7% | CCGTGTAC |
| | | 22 bp_II | CCUGACCCUG | | |
| | | | (SEQ ID NO: 2695) | | |
| OMNI-312 | hCXCR4 | hCXCR4_S107_ | CUGCCUUGCAUA | 1% | AAAGTACC |
| | | 22 bp_II | GGAAGUUCCC | | |
| | | | (SEQ ID NO: 2785) | | |
| OMNI-313 | hCXCR4 | hCXCR4_S123_ | GACUCAGACUCA | 14% | ATGAATGT |
| | | 22 bp_II | GUGGAAACAG | | |
| | | | (SEQ ID NO: 2696) | | |
| OMNI-314 | hCXCR4 | hCXCR4_S116_ | CUGUGUAGAUGA | 12% | CTTGCATA |
| | | 22 bp_II | CAUGGACUGC | | |
| | | | (SEQ ID NO: 2634) | | |
| | hPDCD1 | hPDCD1_S123_ | CAUUCCGCUAGG | 20% | GTGGCATA |
| | | 22 bp_II | AAAGACAAUG | | |
| | | | (SEQ ID NO: 2637) | | |
| OMNI-316 | hCISH | hCISH_S15_ | GGAAAAGGCCUG | 10% | CAGACTCA |
| | | 22 bp_II | CCUCCCCCCU | | |
| | | | (SEQ ID NO: 2786) | | |
| | hCIITA | hCIITA_S1_ | UGAGGGCACGAG | 11% | CAGACTCC |
| | | 22 bp_II | GAGGGGCUGC | | |
| | | | (SEQ ID NO: 2787) | | |
| | hTIGIT | hTIGIT_S31_ | GCCCUGUGAAAG | 13% | GCCGCACT |
| | | 22 bp_II | UCCCGGGCCA | | |
| | | | (SEQ ID NO: 2788) | | |
| | hTRAC | hTRAC_s92_ | UCCUCUUGUCCC | 33% | AGAACCCT |
| | | 22 bp_II | ACAGAUAUCC | | |
| | | | (SEQ ID NO: 2705) | | |
| | hCXCR4 | hCXCR4_S38_ | AUCCACUUGUGC | 33% | CAAACTCA |
| | | 22 bp_II | ACAGUGUUCU | | |
| | | | (SEQ ID NO: 2658) | | |
| | hCXCR4 | hCXCR4_S49_ | CAGGGGACUAUG | 36% | GGAACCCT |
| | | 22 bp_II | ACUCCAUGAA | | |
| | | | (SEQ ID NO: 2701) | | |
| | hELANE | hELANE_g155_ | CUGUCCCUGUGG | 74% | TTGACACC |
| | | 22 bp_II | CCUCUGGGGC | | |
| | | | (SEQ ID NO: 2789) | | |
| OMNI-317 | hSAMD9 | hSAMD9L_g131_ | CACCAAAGGCUC | 2% | GGAAGAAA |
| | | alt_22 bp_II | UUUGUUCCUU | | |
| | | | (SEQ ID NO: 2708) | | |
| | hCXCR4 | hCXCR4_S113_ | GGAAGAAAGCUA | 3% | GATGGAAA |
| | | 22 bp_II | GGGCCUCGGU | | |
| | | | (SEQ ID NO: 2633) | | |
| OMNI-318 | hCXCR4 | hCXCR4_s86_ | UACCAGUUUGCC | 40% | CTGCCCAG |
| | | 22 bp_II | ACGGCAUCAA | | |
| | | | (SEQ ID NO: 2648) | | |
| OMNI-319 | hCXCR4 | hCXCR4_s81_ | GGUAUAUUGGGC | 30% | GAAAATGA |
| | | 22 bp_II | GGGAGUGUCA | | |
| | | | (SEQ ID NO: 2711) | | |
| OMNI-320 | hTRAC | hTRAC_S56_ | AUCCAGAACCCU | 1% | TGTACCAG |
| | | 22 bp_II | GACCCUGCCG | | |
| | | | (SEQ ID NO: 2650) | | |
| | hCXCR4 | hCXCR4_s86_ | UACCAGUUUGCC | 2% | CTGCCCAG |
| | | 22 bp_II | ACGGCAUCAA | | |
| | | | (SEQ ID NO: 2648) | | |
| OMNI-321 | hCXCR4 | hCXCR4_s127_ | AAGGAGUCGAUG | 1% | TGTAGTAA |
| | | 22 bp_II | CUGAUCCCAA | | |
| | | | (SEQ ID NO: 2790) | | |
| OMNI-322 | hTRAC | hTRAC_s95_ | GAUAUCCAGAAC | 12% | CCGTGTAC |
| | | 22 bp_II | CCUGACCCUG | | |
| | | | (SEQ ID NO: 2695) | | |
| OMNI-323 | hCXCR4 | hCXCR4_S15_ | GGAUGGCAAGAG | 55% | CGGAGGAG |
| | | 22 bp_II | ACCCACACAC | | |
| | | | (SEQ ID NO: 2715) | | |
| OMNI-324 | hPDCD1 | hPDCD1_S90_ | ACUGGUACCGCA | 1% | CAACCAGA |
| | | 22 bp_II | UGAGCCCCAG | | |
| | | | (SEQ ID NO: 2791) | | |
| | hCXCR4 | hCXCR4_s85_ | CCUCGGUGAUGG | 1% | GTGCACAG |
| | | 22 bp_II | AAAUCCACUU | | |
| | | | (SEQ ID NO: 2792) | | |
| OMNI-327 | hTRAC | hTRAC_S88_ | GCUGAGAGACUC | 1% | GACAAGTC |
| | | 22 bp_II | UAAAUCCAGU | | |
| | | | (SEQ ID NO: 2607) | | |
| OMNI-336 | hPDCD1 | hPDCD1_S45_ | CAGGGCUGGGGA | 1% | GGGTTCCA |
| | | 22 bp_II | GAAGGUGGGG | | |
| | | | (SEQ ID NO: 2793) | | |
| OMNI-338 | hCXCR4 | hCXCR4_s142_ | ACGAAGGCCCUU | 1% | GGTATATT |
| | | 22 bp_II | CGGUGCUUGG | | |
| | | | (SEQ ID NO: 2794) | | |
| | hCXCR4 | hCXCR4_s141_ | UCGGCCACUGAC | 3% | TGTACTTG |
| | | 22 bp_II | AGGUGCAGCC | | |
| | | | (SEQ ID NO: 2722) | | |
| OMNI-339 | hTRAC | hTRAC_S56_ | AUCCAGAACCCU | 18% | TGTACCAG |
| | | 22 bp_II | GACCCUGCCG | | |
| | | | (SEQ ID NO: 2650) | | |
| | hPDCD1 | hPDCD1_S147_ | CCUGCUCGUGGU | 19% | GACAACGC |
| | | 22 bp_II | GACCGAAGGG | | |
| | | | (SEQ ID NO: 2719) | | |
| OMNI-340 | hCXCR4 | hCXCR4_s144_ | GGGUUCAGACAA | 3% | AAGCTAGG |
| | | 22 bp_II | CAGUGGAAGA | | |
| | | | (SEQ ID NO: 2716) | | |
| | hCXCR4 | hCXCR4_S27_ | CGGCAUCAACUG | 3% | AAGCGTGA |
| | | 22 bp_II | CCCAGAAGGG | | |
| | | | (SEQ ID NO: 2717) | | |
| | hPDCD1 | hPDCD1_S9_ | GCAGCUUCUCCA | 4% | GAGCTTCG |
| | | 22 bp_II | ACACAUCGGA | | |
| | | | (SEQ ID NO: 2718) | | |
| OMNI-341 | hPDCD1 | hPDCD1_S147_ | CCUGCUCGUGGU | 1% | GACAACGC |
| | | 22 bp_II | GACCGAAGGG | | |
| | | | (SEQ ID NO: 2719) | | |
| OMNI-342 | hCXCR4 | hCXCR4_s146_ | CCAGGAUGACCA | 13% | CACAATGC |
| | | 22 bp_II | AUCCAUUGCC | | |
| | | | (SEQ ID NO: 2723) | | |
| OMNI-343 | hCXCR4 | hCXCR4_s148_ | UGGUAACCCAUG | 1% | CCAATCCA |
| | | 22 bp_II | ACCAGGAUGA | | |
| | | | (SEQ ID NO: 2795) | | |
| OMNI-344 | hTRAC | hTRAC_S19_ | CCACUUUCAGGA | 3% | GAACCCAA |
| | | 22 bp_II | GGAGGAUUCG | | |
| | | | (SEQ ID NO: 2725) | | |
| | hTRAC | hTRAC_S71_ | GUCCCACAGAUA | 5% | TGACCCTG |
| | | 22 bp_II | UCCAGAACCC | | |
| | | | (SEQ ID NO: 2726) | | |
| OMNI-349 | hCXCR4 | hCXCR4_s156_ | UGGGCGGGAGUG | 1% | AACAAACG |
| | | 22 bp_II | UCAGAAAAUG | | |
| | | | (SEQ ID NO: 2796) | | |
| OMNI-352 | hPDCD1 | hPDCD1_S45_ | CAGGGCUGGGGA | 1% | GGGTTCCA |
| | | 22 bp_II | GAAGGUGGGG | | |
| | | | (SEQ ID NO: 2793) | | |
| | hPDCD1 | hPDCD1_S21_ | UCCGUGUCACAC | 1% | CGGGCGTG |
| | | 22 bp_II | AACUGCCCAA | | |
| | | | (SEQ ID NO: 2797) | | |
| OMNI-353 | hCXCR4 | hCXCR4_s81_ | GGUAUAUUGGGC | 25% | GAAAATGA |
| | | 22 bp_II | GGGAGUGUCA | | |
| | | | (SEQ ID NO: 2711) | | |
| OMNI-354 | hCXCR4 | hCXCR4_s159_ | AACACGAGGAUG | 14% | CACACACC |
| | | 22 bp_II | GCAAGAGACC | | |
| | | | (SEQ ID NO: 2727) | | |
| OMNI-357 | hPDCD1 | hPDCD1_S45_ | CAGGGCUGGGGA | 1% | GGGTTCCA |
| | | 22 bp_II | GAAGGUGGGG | | |
| | | | (SEQ ID NO: 2793) | | |
| OMNI-358 | hTRAC | hTRAC_S35_ | GACCCUGCCGUG | 20% | GAGACTCT |
| | | 22 bp_II | UACCAGCUGA | | |
| | | | (SEQ ID NO: 2617) | | |
| OMNI-359 | hSAMD9 | hSAMD9L_g97_ | UUGACCACUUCA | 2% | CAAAAAGT |
| | | 22 bp_II | AUGUAAUGAU | | |
| | | | (SEQ ID NO: 2739) | | |
| | hSAMD9 | hSAMD9L_g172_ | ACCAAAAAAAUC | 2% | CAAAAAGG |
| | | alt_22 bp_II | CAAAACACAC | | |
| | | | (SEQ ID NO: 2738) | | |
| | hCXCR4 | hCXCR4_s164_ | CCUUCUGGGCAG | 2% | GGCAAACT |
| | | 22 bp_II | UUGAUGCCGU | | |
| | | | (SEQ ID NO: 2737) | | |
| OMNI-360 | hCXCR4 | hCXCR4_S39_ | AUCCUGGUCAUG | 1% | AGAAACTG |
| | | 22 bp_II | GGUUACCAGA | | |
| | | | (SEQ ID NO: 2798) | | |
| OMNI-362 | hCXCR4 | hCXCR4_s167_ | AAACAGGGUUCC | 11% | CATAGTCC |
| | | 22 bp_II | UUCAUGGAGU | | |
| | | | (SEQ ID NO: 2740) | | |
| | hCXCR4 | hCXCR4_s167_ | AAACAGGGUUCC | 11% | CATAGTCC |
| | | 22 bp_II | UUCAUGGAGU | | |
| | | | (SEQ ID NO: 2740) | | |
| OMNI-365 | hCXCR4 | hCXCR4_S55_ | CACGAGGAUGGC | 16% | CACACCGG |
| | | 22 bp_II | AAGAGACCCA | | |
| | | | (SEQ ID NO: 2605) | | |
| OMNI-366 | hTIGIT | hTIGIT_S34_ | GCUGUGACAGCC | 16% | CCTACCAC |
| | | 22 bp_II | AUGGAGCUCC | | |
| | | | (SEQ ID NO: 2799) | | |
| | hPDCD1 | hPDCD1_S145_ | UCGGAGAGCUUC | 23% | GGTACCGC |
| | | 22 bp_II | GUGCUAAACU | | |
| | | | (SEQ ID NO: 2746) | | |
| | hCXCR4 | hCXCR4_s154_ | GCCUUGCAUAGG | 50% | AGTACCAG |
| | | 22 bp_II | AAGUUCCCAA | | |
| | | | (SEQ ID NO: 2744) | | |
| | hCXCR4 | hCXCR4_s169_ | UUCUUCGCCUGU | 53% | ACTACATT |
| | | 22 bp_II | UGGCUGCCUU | | |
| | | | (SEQ ID NO: 2745) | | |
| | hB2M | hB2M_S42_ | CCGUGGCCUUAG | 55% | GCTACTCT |
| | | 22 bp_II | CUGUGCUCGC | | |
| | | | (SEQ ID NO: 2800) | | |
| | hPDCD1 | hPDCD1_S146_ | GUCUGGUUGCUG | 56% | GGTACCAG |
| | | 22 bp_II | GGGCUCAUGC | | |
| | | | (SEQ ID NO: 2747) | | |
| | hTRAC | hTRAC_S56_ | AUCCAGAACCCU | 59% | TGTACCAG |
| | | 22 bp_II | GACCCUGCCG | | |
| | | | (SEQ ID NO: 2650) | | |
| | hTRAC | hTRAC_s184_ | CUGGAUUUAGAG | 62% | GGTACACG |
| | | 22 bp_II | UCUCUCAGCU | | |
| | | | (SEQ ID NO: 2748) | | |
| OMNI-368 | hCIITA | hCIITA_S2_ | AGGUAGCCACCU | 14% | CCAACTCC |
| | | 22 bp_II | UCUAGGGGCC | | |
| | | | (SEQ ID NO: 2801) | | |
| | hPDCD1 | hPDCD1_S40_ | AACACAUCGGAG | 17% | TAAACTGG |
| | | 22 bp_II | AGCUUCGUGC | | |
| | | | (SEQ ID NO: 2735) | | |
| | hTRAC | hTRAC_S36_ | UCAAAAUCGGUG | 21% | CAGACTTG |
| | | 22 bp_II | AAUAGGCAGA | | |
| | | | (SEQ ID NO: 2802) | | |
| | hTRAC | hTRAC_S35_ | GACCCUGCCGUG | 24% | GAGACTCT |
| | | 22 bp_II | UACCAGCUGA | | |
| | | | (SEQ ID NO: 2617) | | |
| | hCXCR4 | hCXCR4_s168_ | UACACCGAGGAA | 51% | GGGACTAT |
| | | 22 bp_II | AUGGGCUCAG | | |
| | | | (SEQ ID NO: 2803) | | |
| | hTRAC | hTRAC_S35_ | GACCCUGCCGUG | 66% | GAGACTCT |
| | | 22 bp_II | UACCAGCUGA | | |
| | | | (SEQ ID NO: 2617) | | |
| OMNI-369 | hCXCR4 | hCXCR4_s176_ | CUGAUCCCAAUG | 11% | GCCAACAG |
| | | 22 bp_II | UAGUAAGGCA | | |
| | | | (SEQ ID NO: 2750) | | |
| | hTRAC | hTRAC_S89_ | CAUGAGGUCUAU | 16% | AGCAACAG |
| | | 22 bp_II | GGACUUCAAG | | |
| | | | (SEQ ID NO: 2754) | | |
| | hPDCD1 | hPDCD1_S147_ | CCUGCUCGUGGU | 32% | GACAACGC |
| | | 22 bp_II | GACCGAAGGG | | |
| | | | (SEQ ID NO: 2719) | | |
| OMNI-370 | hTRAC | hTRAC S69_ | UCCUGUGAUGUC | 11% | AGAAAAGC |
| | | 22 bp_II | AAGCUGGUCG | | |
| | | | (SEQ ID NO: 2758) | | |
| | hCXCR4 | hCXCR4_s164_ | CCUUCUGGGCAG | 15% | GGCAAACT |
| | | 22 bp_II | UUGAUGCCGU | | |
| | | | (SEQ ID NO: 2737) | | |
| OMNI-373 | hPDCD1 | hPDCD1_S40_ | AACACAUCGGAG | 4% | TAAACTGG |
| | | 22 bp_II | AGCUUCGUGC | | |
| | | | (SEQ ID NO: 2735) | | |
| | hTRAC | hTRAC_S35_ | GACCCUGCCGUG | 5% | GAGACTCT |
| | | 22 bp_II | UACCAGCUGA | | |
| | | | (SEQ ID NO: 2617) | | |
| OMNI-375 | hTRAC | hTRAC_s92_ | UCCUCUUGUCCC | 47% | AGAACCCT |
| | | 22 bp_II | ACAGAUAUCC | | |
| | | | (SEQ ID NO: 2705) | | |
| OMNI-376 | hPDCD1 | hPDCD1_S147_ | CCUGCUCGUGGU | 12% | GACAACGC |
| | | 22 bp_II | GACCGAAGGG | | |
| | | | (SEQ ID NO: 2719) | | |
| | hTIGIT | hTIGIT_S33_ | CACCACGGCACA | 18% | GTCAACTG |
| | | 22 bp_II | AGUGACCCAG | | |
| | | | (SEQ ID NO: 2804) | | |
| | hB2M | hB2M_g93_ | GAUGGAUGAAAC | 22% | AGCAATTC |
| | | 22 bp_II | CCAGACACAU | | |
| | | | (SEQ ID NO: 2805) | | |
| | hPDCD1 | hPDCD1_S6_ | CAUGAGCGUGGU | 23% | CGCAATGA |
| | | 22 bp_II | CAGGGCCCGG | | |
| | | | (SEQ ID NO: 2606) | | |
| | hCIITA | hCIITA_S19_ | UGCUGCCUGGCU | 47% | CACAATGC |
| | | 22 bp_II | GGGAUUCCUA | | |
| | | | (SEQ ID NO: 2806) | | |
| | hTRAC | hTRAC_s180_ | CCUCCUCCUGAA | 55% | TTTAATCT |
| | | 22 bp_II | AGUGGCCGGG | | |
| | | | (SEQ ID NO: 2765) | | |
| OMNI-377 | hPDCD1 | hPDCD1_S56_ | GACAAGCUGGCC | 24% | AGGACCGC |
| | | 22 bp_II | GCCUUCCCCG | | |
| | | | (SEQ ID NO: 2768) | | |
| | hTRAC | hTRAC_S56_ | AUCCAGAACCCU | 30% | TGTACCAG |
| | | 22 bp_II | GACCCUGCCG | | |
| | | | (SEQ ID NO: 2650) | | |
| OMNI-378 | hPDCD1 | hPDCD1_S33_ | ACAUGAGCGUGG | 1% | GCGCAATG |
| | | 22 bp_II | UCAGGGCCCG | | |
| | | | (SEQ ID NO: 2772) | | |
| | hCXCR4 | hCXCR4_S33_ | GGAGUCGAUGCU | 1% | TAGTAAGG |
| | | 22 bp_II | GAUCCCAAUG | | |
| | | | (SEQ ID NO: 2771) | | |
| | hTRAC | hTRAC_s115_ | UGUGUAUAUCAC | 9% | GTGCTAGA |
| | | 22 bp_II | AGACAAAACU | | |
| | | | (SEQ ID NO: 2773) | | |
| OMNI-381 | hTRAC | hTRAC_S15_ | UAAACCCGGCCA | 18% | GAGGATTC |
| | | 22 bp_II | CUUUCAGGAG | | |
| | | | (SEQ ID NO: 2775) | | |
| OMNI-382 | hCXCR4 | hCXCR4_s192_ | ACUGCCCAGAAG | 1% | TGACAAAG |
| | | 22 bp_II | GGAAGCGUGA | | |
| | | | (SEQ ID NO: 2807) | | |
| | hCXCR4 | hCXCR4_s191_ | GAAAGCAUAGAG | 1% | AGACAACA |
| | | 22 bp_II | GAUGGGGUUC | | |
| | | | (SEQ ID NO: 2776) | | |
| OMNI-385 | hCXCR4 | hCXCR4_s80_ | AUGGGGUUCAGA | 13% | AGAAAGCT |
| | | 22 bp_II | CAACAGUGGA | | |
| | | | (SEQ ID NO: 2778) | | |
| OMNI-386 | hPDCD1 | hPDCD1_S174_ | CCCUGCUCGUGG | 15% | GGACAACG |
| | | 22 bp_II | UGACCGAAGG | | |
| | | | (SEQ ID NO: 2780) | | |

### REFERENCES

[0759] 1. Ahmad and Allen (1992) “Antibody-mediated Specific Binging and Cytotoxicity of Lipsome-entrapped Doxorubicin to Lung Cancer Cells in Vitro”, Cancer Research 52:4817-20.
[0760] 2. Anderson (1992) “Human gene therapy”, Science 256:808-13.
[0761] 3. Basha et al. (2011) “Influence of Cationic Lipid Composition on Gene Silencing Properties of Lipid Nanoparticle Formulations of siRNA in Antigen-Presenting Cells”, Mol. Ther. 19(12):2186-200.
[0762] 4. Behr (1994) “Gene transfer with synthetic cationic amphiphiles: Prospects for gene therapy”, Bioconjuage Chem 5:382-89.
[0763] 5. Blaese et al. (1995) “Vectors in cancer therapy: how will they deliver”, Cancer Gene Ther. 2:291-97.
[0764] 6. Blaese et al. (1995) “T lympocyte-directed gene therapy for ADA-SCID: initial trial results after 4 years”, Science 270(5235):475-80.
[0765] 7. Briner et al. (2014) “Guide RNA functional modules direct Cas9 activity and orthognality”, Molecular Cell 56:333-39.
[0766] 8. Buchschacher and Panganiban (1992) “Human immunodeficiency virus vectors for inducible expression of foreign genes”, J. Virol. 66:2731-39.
[0767] 9. Burstein et al. (2017) “New CRISPR-Cas systems from uncultivated microbes”, Nature 542:237-41.
[0768] 10. Canver et al., (2015) “BCL11A enhancer dissection by Cas9-mediated in situ saturating mutagenesis”, Nature Vol. 527, Pgs. 192-214.
[0769] 11. Chang and Wilson (1987) “Modification of DNA ends can decrease end-joining relative to homologous recombination in mammalian cells”, Proc. Natl. Acad. Sci. USA 84:4959-4963.
[0770] 12. Charlesworth et al. (2019) “Identification of preexisting adaptive immunity to Cas9 proteins in humans”, Nature Medicine, 25(2), 249.
[0771] 13. Chung et al. (2006) “Agrobacterium is not alone: gene transfer to plants by viruses and other bacteria”, Trends Plant Sci. 11(1):1-4.
[0772] 14. Coelho et al. (2013) “Safety and efficacy of RNAi therapy for transthyretin amyloidosis” N. Engl. J. Med. 369, 819-829.
[0773] 15. Crystal (1995) “Transfer of genes to humans: early lessons and obstacles to success”, Science 270(5235):404-10.
[0774] 16. Dillon (1993) “Regulation gene expression in gene therapy” Trends in Biotechnology 11(5):167-173.
[0775] 17. Dranoff et al. (1997) “A phase I study of vaccination with autologous, irradiated melanoma cells engineered to secrete human granulocyte macrophage colony stimulating factor”, Hum. Gene Ther. 8(1):111-23.
[0776] 18. Dunbar et al. (1995) “Retrovirally marked CD34-enriched peripheral blood and bone marrow cells contribute to long-term engraftment after autologous transplantation”, Blood 85:3048-57.
[0777] 19. Ellem et al. (1997) “A case report: immune responses and clinical course of the first human use of ganulocyte/macrophage-colony-stimulating-factor-tranduced autologous melanoma cells for immunotherapy”, Cancer Immunol Immunother 44:10-20.
[0778] 20. Gao and Huang (1995) “Cationic liposome-mediated gene transfer” Gene Ther. 2(10):710-22.
[0779] 21. Haddada et al. (1995) “Gene Therapy Using Adenovirus Vectors”, in: The Molecular Repertoire of Adenoviruses III: Biology and Pathogenesis, ed. Doerfler and Bohm, pp. 297-306.
[0780] 22. Han et al. (1995) “Ligand-directed retro-viral targeting of human breast cancer cells”, Proc. Natl. Acad. Sci. USA 92(21):9747-51.
[0781] 23. Humbert et al., (2019) “Therapeutically relevant engraftment of a CRISPR-Cas9-edited HSC-enriched population with HbF reactivation in nonhuman primates”, Sci. Trans. Med., Vol. 11, Pgs. 1-13.
[0782] 24. Inaba et al. (1992) “Generation of large numbers of dendritic cells from mouse bone marrow cultures supplemented with granulocyte/macrophage colony-stimulating factor”, J Exp Med. 176(6):1693-702.
[0783] 25. Jinek et al. (2012) “A programmable dual-RNA-guided DNA endonuclease in adaptive bacterial immunity”, Science 337(6096):816-21.
[0784] 26. Johan et al. (1992) “GLVR1, a receptor for gibbon ape leukemia virus, is homologous to a phosphate permease of Neurospora crassa and is expressed at high levels in the brain and thymus”, J Virol 66(3):1635-40.
[0785] 27. Judge et al. (2006) “Design of noninflammatory synthetic siRNA mediating potent gene silencing in vivo”, Mol Ther. 13(3):494-505.
[0786] 28. Kohn et al. (1995) “Engraftment of gene-modified umbilical cord blood cells in neonates with adnosine deaminase deficiency”, Nature Medicine 1:1017-23.
[0787] 29. Kremer and Perricaudet (1995) “Adenovirus and adeno-associated virus mediated gene transfer”, Br. Med. Bull. 51(1):31-44.
[0788] 30. Macdiarmid et al. (2009) “Sequential treatment of drug-resistant tumors with targeted minicells containing siRNA or a cytotoxic drug”, Nat Biotehcnol. 27(7):643-51.
[0789] 31. Malech et al. (1997) “Prolonged production of NADPH oxidase-corrected granulocyes after gene therapy of chronic granulomatous disease”, PNAS 94(22):12133-38.
[0790] 32. Maxwell et al. (2018) “A detailed cell-free transcription-translation-based assay to decipher CRISPR protospacer adjacent motifs”, Methods 14348-57
[0791] 33. Miller et al. (1991) “Construction and properties of retrovirus packaging cells based on gibbon ape leukemia virus”, J Virol. 65(5):2220-24.
[0792] 34. Miller (1992) “Human gene therapy comes of age”, Nature 357:455-60.
[0793] 35. Mitani and Caskey (1993) “Delivering therapeutic genes—matching approach and application”, Trends in Biotechnology 11(5):162-66.
[0794] 36. Nabel and Felgner (1993) “Direct gene transfer for immunotherapy and immunization”, Trends in Biotechnology 11(5):211-15.
[0795] 37. Nehls et al. (1996) “Two genetically separable steps in the differentiation of thymic epithelium” Science 272:886-889.
[0796] 38. Remy et al. (1994) “Gene Transfer with a Series of Lipphilic DNA-Binding Molecules”, Bioconjugate Chem. 5(6):647-54.
[0797] 39. Sentmanat et al. (2018) “A Survey of Validation Strategies for CRISPR-Cas9 Editing”, Scientific Reports 8:888, doi:10.1038/s41598-018-19441-8.
[0798] 40. Sommerfelt et al. (1990) “Localization of the receptor gene for type D simian retroviruses on human chromosome 19”, J. Virol. 64(12):6214-20.
[0799] 41. Van Brunt (1988) “Molecular framing: transgenic animals as bioactors” Biotechnology 6:1149-54.
[0800] 42. Vigne et al. (1995) “Third-generation adenovectors for gene therapy”, Restorative Neurology and Neuroscience 8(1,2): 35-36.
[0801] 43. Wagner et al. (2019) “High prevalence of Streptococcus pyogenes Cas9-reactive T cells within the adult human population” Nature Medicine, 25(2), 242
[0802] 44. Wilson et al. (1989) “Formation of infectious hybrid virion with gibbon ape leukemia virus and human T-cell leukemia virus retroviral envelope glycoproteins and the gag and pol proteins of Moloney murine leukemia virus”, J. Virol. 63:2374-78.
[0803] 45. Yu et al. (1994) “Progress towards gene therapy for HIV infection”, Gene Ther. 1(1):13-26.
[0804] 46. Zetsche et al. (2015) “Cpf1 is a single RNA-guided endonuclease of a class 2 CRIPSR-Cas system” Cell 163(3):759-71.
[0805] 47. Zuris et al. (2015) “Cationic lipid-mediated delivery of proteins enables efficient protein based genome editing in vitro and in vivo” Nat Biotechnol. 33(1):73-80.

What is claimed is:

1. A non-naturally occurring composition comprising a CRISPR nuclease comprising a sequence having at least 90% identity to the amino acid sequence selected from the group consisting of SEQ ID NOs: 13, 1-12, and 14-108, or a nucleic acid molecule comprising a sequence encoding the CRISPR nuclease.

2. The composition of claim 1, further comprising one or more RNA molecules, or a DNA polynucleotide encoding any one of the one or more RNA molecules, wherein the one or more RNA molecules and the CRISPR nuclease do not naturally occur together and the one or more RNA molecules are configured to form a complex with the CRISPR nuclease and/or target the complex to a target site.

3. The composition of claim 2, wherein the CRISPR nuclease comprises a sequence having at least 90% identity to the amino acid sequence set forth in SEQ ID NO: 13, and at least one RNA molecule comprises a sequence selected from the group consisting of SEQ ID NOs: 513-535.

4. The composition of claim 3, wherein the CRISPR nuclease comprises a sequence having at least 90% identity to the amino acid sequence set forth in SEQ ID NO: 13 and at least one RNA molecule is a CRISPR RNA (crRNA) molecule comprising a guide sequence portion and a sequence selected from the group consisting of SEQ ID NOs: 514-517 and 528-531.

5. The composition of claim 4, further comprising a transactivating CRISPR RNA (tracrRNA) molecule comprising a sequence set forth in the group consisting of SEQ ID NOs: 518-526 and 532-535.

6. The composition of claim 2, wherein the CRISPR nuclease comprises a sequence having at least 90% identity to the amino acid sequence set forth in SEQ ID NO: 13 and at least one RNA molecule is a single-guide RNA (sgRNA) molecule comprising a guide sequence portion and a sequence selected from the group consisting of SEQ ID NOs: 513-535.

7. The composition of claim 2, wherein the CRISPR nuclease comprises a sequence having at least 90% identity to the amino acid sequence set forth in SEQ ID NO: 1, and at least one RNA molecule comprises a sequence selected from the group consisting of SEQ ID NOs: 325-338,
wherein the CRISPR nuclease comprises a sequence having at least 90% identity to the amino acid sequence set forth in SEQ ID NO: 2, and at least one RNA molecule comprises a sequence selected from the group consisting of SEQ ID NOs: 339-352,
wherein the CRISPR nuclease comprises a sequence having at least 90% identity to the amino acid sequence set forth in SEQ ID NO: 3, and at least one RNA molecule comprises a sequence selected from the group consisting of SEQ ID NOs: 353-368,
wherein the CRISPR nuclease comprises a sequence having at least 90% identity to the amino acid sequence set forth in SEQ ID NO: 4 and at least one RNA molecule comprises a sequence selected from the group consisting of SEQ ID NOs: 369-380,
wherein the CRISPR nuclease comprises a sequence having at least 90% identity to the amino acid sequence set forth in SEQ ID NO: 5, and at least one RNA molecule comprises a sequence selected from the group consisting of SEQ ID NOs: 381-395,
wherein the CRISPR nuclease comprises a sequence having at least 90% identity to the amino acid sequence set forth in SEQ ID NO: 6 and at least one RNA molecule comprises a sequence selected from the group consisting of SEQ ID NOs: 396-409,
wherein the CRISPR nuclease comprises a sequence having at least 90% identity to the amino acid sequence set forth in SEQ ID NO: 7 and at least one RNA molecule comprises a sequence selected from the group consisting of SEQ ID NOs: 410-433,
wherein the CRISPR nuclease comprises a sequence having at least 90% identity to the amino acid sequence set forth in SEQ ID NO: 8 and at least one RNA molecule comprises a sequence selected from the group consisting of SEQ ID NOs: 434-447,
wherein the CRISPR nuclease comprises a sequence having at least 90% identity to the amino acid sequence set forth in SEQ ID NO: 9 and at least one RNA molecule comprises a sequence selected from the group consisting of SEQ ID NOs: 448-461,
wherein the CRISPR nuclease comprises a sequence having at least 90% identity to the amino acid sequence set forth in SEQ ID NO: 10, and at least one RNA molecule comprises a sequence selected from the group consisting of SEQ ID NOs: 462-475,
wherein the CRISPR nuclease comprises a sequence having at least 90% identity to the amino acid sequence set forth in SEQ ID NO: 11, and at least one RNA molecule comprises a sequence selected from the group consisting of SEQ ID NOs: 476-491,
wherein the CRISPR nuclease comprises a sequence having at least 90% identity to the amino acid sequence set forth in SEQ ID NO: 12, and at least one RNA molecule comprises a sequence selected from the group consisting of SEQ ID NOs: 492-512,
wherein the CRISPR nuclease comprises a sequence having at least 90% identity to the amino acid sequence set forth in SEQ ID NO: 14, and at least one RNA molecule comprises a sequence selected from the group consisting of SEQ ID NOs: 536-549,
wherein the CRISPR nuclease comprises a sequence having at least 90% identity to the amino acid sequence set forth in SEQ ID NO: 15, and at least one RNA molecule comprises a sequence selected from the group consisting of SEQ ID NOs: 550-575,
wherein the CRISPR nuclease comprises a sequence having at least 90% identity to the amino acid sequence set forth in SEQ ID NO: 16, and at least one RNA molecule comprises a sequence selected from the group consisting of SEQ ID NOs: 576-598,
wherein the CRISPR nuclease comprises a sequence having at least 90% identity to the amino acid sequence set forth in SEQ ID NO: 17, and at least one RNA molecule comprises a sequence selected from the group consisting of SEQ ID NOs: 599-612,
wherein the CRISPR nuclease comprises a sequence having at least 90% identity to the amino acid sequence set forth in SEQ ID NO: 18, and at least one RNA molecule comprises a sequence selected from the group consisting of SEQ ID NOs: 613-633 wherein the CRISPR nuclease comprises a sequence having at least 90% identity to the amino acid sequence set forth in SEQ ID NO: 19, and at least one RNA molecule comprises a sequence selected from the group consisting of SEQ ID NOs: 634-651,
wherein the CRISPR nuclease comprises a sequence having at least 90% identity to the amino acid sequence set forth in SEQ ID NO: 20, and at least one RNA molecule comprises a sequence selected from the group consisting of SEQ ID NOs: 652-665,
wherein the CRISPR nuclease comprises a sequence having at least 90% identity to the amino acid sequence set forth in SEQ ID NO: 21, and at least one RNA molecule comprises a sequence selected from the group consisting of SEQ ID NOs: 666-683 and UUGCUACAA,
wherein the CRISPR nuclease comprises a sequence having at least 90% identity to the amino acid sequence set forth in SEQ ID NO: 22, and at least one RNA molecule comprises a sequence selected from the group consisting of SEQ ID NOs: 684-707,
wherein the CRISPR nuclease comprises a sequence having at least 90% identity to the amino acid sequence set forth in SEQ ID NO: 23, and at least one RNA molecule comprises a sequence selected from the group consisting of SEQ ID NOs: 708-728,
wherein the CRISPR nuclease comprises a sequence having at least 90% identity to the amino acid sequence set forth in SEQ ID NO: 24, and at least one RNA molecule comprises a sequence selected from the group consisting of SEQ ID NOs: 729-742,
wherein the CRISPR nuclease comprises a sequence having at least 90% identity to the amino acid sequence set forth in SEQ ID NO: 25, and at least one RNA molecule comprises a sequence selected from the group consisting of SEQ ID NOs: 743-761,
wherein the CRISPR nuclease comprises a sequence having at least 90% identity to the amino acid sequence set forth in SEQ ID NO: 26, and at least one RNA molecule comprises a sequence selected from the group consisting of SEQ ID NOs: 762-775,
wherein the CRISPR nuclease comprises a sequence having at least 90% identity to the amino acid sequence set forth in SEQ ID NO: 27, and at least one RNA molecule comprises a sequence selected from the group consisting of SEQ ID NOs: 776-798,
wherein the CRISPR nuclease comprises a sequence having at least 90% identity to the amino acid sequence set forth in SEQ ID NO: 28, and at least one RNA molecule comprises a sequence selected from the group consisting of SEQ ID NOs: 799-816,
wherein the CRISPR nuclease comprises a sequence having at least 90% identity to the amino acid sequence set forth in SEQ ID NO: 29, and at least one RNA molecule comprises a sequence selected from the group consisting of SEQ ID NOs: 817-830,
wherein the CRISPR nuclease comprises a sequence having at least 90% identity to the amino acid sequence set forth in SEQ ID NO: 30, and at least one RNA molecule comprises a sequence selected from the group consisting of SEQ ID NOs: 831-844,
wherein the CRISPR nuclease comprises a sequence having at least 90% identity to the amino acid sequence set forth in SEQ ID NO: 31, and at least one RNA molecule comprises a sequence selected from the group consisting of SEQ ID NOs: 845-862,
wherein the CRISPR nuclease comprises a sequence having at least 90% identity to the amino acid sequence set forth in SEQ ID NO: 32, and at least one RNA molecule comprises a sequence selected from the group consisting of SEQ ID NOs: 863-883,
wherein the CRISPR nuclease comprises a sequence having at least 90% identity to the amino acid sequence set forth in SEQ ID NO: 33, and at least one RNA molecule comprises a sequence selected from the group consisting of SEQ ID NOs: 884-901 and UUACUACAA,
wherein the CRISPR nuclease comprises a sequence having at least 90% identity to the amino acid sequence set forth in SEQ ID NO: 34, and at least one RNA molecule comprises a sequence selected from the group consisting of SEQ ID NOs: 902-915,
wherein the CRISPR nuclease comprises a sequence having at least 90% identity to the amino acid sequence set forth in SEQ ID NO: 35, and at least one RNA molecule comprises a sequence selected from the group consisting of SEQ ID NOs: 916-931,
wherein the CRISPR nuclease comprises a sequence having at least 90% identity to the amino acid sequence set forth in SEQ ID NO: 36, and at least one RNA molecule comprises a sequence selected from the group consisting of SEQ ID NOs: 932-947,
wherein the CRISPR nuclease comprises a sequence having at least 90% identity to the amino acid sequence set forth in SEQ ID NO: 37, and at least one RNA molecule comprises a sequence selected from the group consisting of SEQ ID NOs: 948-962,
wherein the CRISPR nuclease comprises a sequence having at least 90% identity to the amino acid sequence set forth in SEQ ID NO: 38, and at least one RNA molecule comprises a sequence selected from the group consisting of SEQ ID NOs: 963-985,
wherein the CRISPR nuclease comprises a sequence having at least 90% identity to the amino acid sequence set forth in SEQ ID NO: 39, and at least one RNA molecule comprises a sequence selected from the group consisting of SEQ ID NOs: 986-1010,
wherein the CRISPR nuclease comprises a sequence having at least 90% identity to the amino acid sequence set forth in SEQ ID NO: 40, and at least one RNA molecule comprises a sequence selected from the group consisting of SEQ ID NOs: 1011-1029,
wherein the CRISPR nuclease comprises a sequence having at least 90% identity to the amino acid sequence set forth in SEQ ID NO: 41, and at least one RNA molecule comprises a sequence selected from the group consisting of SEQ ID NOs: 1030-1050, UUACUAAAA, and UUACUAGAA,
wherein the CRISPR nuclease comprises a sequence having at least 90% identity to the amino acid sequence set forth in SEQ ID NO: 42, and at least one RNA molecule comprises a sequence selected from the group consisting of SEQ ID NOs: 1051-1080,
wherein the CRISPR nuclease comprises a sequence having at least 90% identity to the amino acid sequence set forth in SEQ ID NO: 43, and at least one RNA molecule comprises a sequence selected from the group consisting of SEQ ID NOs: 1081-1101, UUACUAAAA, and UUACUAGAA,
wherein the CRISPR nuclease comprises a sequence having at least 90% identity to the amino acid sequence set forth in SEQ ID NO: 44, and at least one RNA molecule comprises a sequence selected from the group consisting of SEQ ID NOs: 1102-1115,
wherein the CRISPR nuclease comprises a sequence having at least 90% identity to the amino acid sequence set forth in SEQ ID NO: 45, and at least one RNA molecule comprises a sequence selected from the group consisting of SEQ ID NOs: 1116-1135,
wherein the CRISPR nuclease comprises a sequence having at least 90% identity to the amino acid sequence set forth in SEQ ID NO: 46, and at least one RNA molecule comprises a sequence selected from the group consisting of SEQ ID NOs: 1136-1167,
wherein the CRISPR nuclease comprises a sequence having at least 90% identity to the amino acid sequence set forth in SEQ ID NO: 47, and at least one RNA molecule comprises a sequence selected from the group consisting of SEQ ID NOs: 1168-1186,
wherein the CRISPR nuclease comprises a sequence having at least 90% identity to the amino acid sequence set forth in SEQ ID NO: 48, and at least one RNA molecule comprises a sequence selected from the group consisting of SEQ ID NOs: 1187-1211,
wherein the CRISPR nuclease comprises a sequence having at least 90% identity to the amino acid sequence set forth in SEQ ID NO: 49, and at least one RNA molecule comprises a sequence selected from the group consisting of SEQ ID NOs: 1212-1243,
wherein the CRISPR nuclease comprises a sequence having at least 90% identity to the amino acid sequence set forth in SEQ ID NO: 50, and at least one RNA molecule comprises a sequence selected from the group consisting of SEQ ID NOs: 1244-1255,
wherein the CRISPR nuclease comprises a sequence having at least 90% identity to the amino acid sequence set forth in SEQ ID NO: 51, and at least one RNA molecule comprises a sequence selected from the group consisting of SEQ ID NOs: 1256-1284,
wherein the CRISPR nuclease comprises a sequence having at least 90% identity to the amino acid sequence set forth in SEQ ID NO: 52, and at least one RNA molecule comprises a sequence selected from the group consisting of SEQ ID NOs: 1285-1298,
wherein the CRISPR nuclease comprises a sequence having at least 90% identity to the amino acid sequence set forth in SEQ ID NO: 53, and at least one RNA molecule comprises a sequence selected from the group consisting of SEQ ID NOs: 1299-1312,
wherein the CRISPR nuclease comprises a sequence having at least 90% identity to the amino acid sequence set forth in SEQ ID NO: 54, and at least one RNA molecule comprises a sequence selected from the group consisting of SEQ ID NOs: 1313-1342,
wherein the CRISPR nuclease comprises a sequence having at least 90% identity to the amino acid sequence set forth in SEQ ID NO: 55, and at least one RNA molecule comprises a sequence selected from the group consisting of SEQ ID NOs: 1343-1362,
wherein the CRISPR nuclease comprises a sequence having at least 90% identity to the amino acid sequence set forth in SEQ ID NO: 56, and at least one RNA molecule comprises a sequence selected from the group consisting of SEQ ID NOs: 1363-1378,
wherein the CRISPR nuclease comprises a sequence having at least 90% identity to the amino acid sequence set forth in SEQ ID NO: 57, and at least one RNA molecule comprises a sequence selected from the group consisting of SEQ ID NOs: 1379-1397,
wherein the CRISPR nuclease comprises a sequence having at least 90% identity to the amino acid sequence set forth in SEQ ID NO: 58, and at least one RNA molecule comprises a sequence selected from the group consisting of SEQ ID NOs: 1398-1413,
wherein the CRISPR nuclease comprises a sequence having at least 90% identity to the amino acid sequence set forth in SEQ ID NO: 59, and at least one RNA molecule comprises a sequence selected from the group consisting of SEQ ID NOs: 1414-1437,
wherein the CRISPR nuclease comprises a sequence having at least 90% identity to the amino acid sequence set forth in SEQ ID NO: 60, and at least one RNA molecule comprises a sequence selected from the group consisting of SEQ ID NOs: 1438-1462,
wherein the CRISPR nuclease comprises a sequence having at least 90% identity to the amino acid sequence set forth in SEQ ID NO: 61, and at least one RNA molecule comprises a sequence selected from the group consisting of SEQ ID NOs: 1463-1495,
wherein the CRISPR nuclease comprises a sequence having at least 90% identity to the amino acid sequence set forth in SEQ ID NO: 62, and at least one RNA molecule comprises a sequence selected from the group consisting of SEQ ID NOs: 1496-1533,
wherein the CRISPR nuclease comprises a sequence having at least 90% identity to the amino acid sequence set forth in SEQ ID NO: 63, and at least one RNA molecule comprises a sequence selected from the group consisting of SEQ ID NOs: 1534-1556,
wherein the CRISPR nuclease comprises a sequence having at least 90% identity to the amino acid sequence set forth in SEQ ID NO: 64, and at least one RNA molecule comprises a sequence selected from the group consisting of SEQ ID NOs: 1557-1572,
wherein the CRISPR nuclease comprises a sequence having at least 90% identity to the amino acid sequence set forth in SEQ ID NO: 65, and at least one RNA molecule comprises a sequence selected from the group consisting of SEQ ID NOs: 1573-1617,
wherein the CRISPR nuclease comprises a sequence having at least 90% identity to the amino acid sequence set forth in SEQ ID NO: 66, and at least one RNA molecule comprises a sequence selected from the group consisting of SEQ ID NOs: 1618-1634,
wherein the CRISPR nuclease comprises a sequence having at least 90% identity to the amino acid sequence set forth in SEQ ID NO: 67, and at least one RNA molecule comprises a sequence selected from the group consisting of SEQ ID NOs: 1635-1655,
wherein the CRISPR nuclease comprises a sequence having at least 90% identity to the amino acid sequence set forth in SEQ ID NO: 68, and at least one RNA molecule comprises a sequence selected from the group consisting of SEQ ID NOs: 1656-1674,
wherein the CRISPR nuclease comprises a sequence having at least 90% identity to the amino acid sequence set forth in SEQ ID NO: 69, and at least one RNA molecule comprises a sequence selected from the group consisting of SEQ ID NOs: 1675-1701,
wherein the CRISPR nuclease comprises a sequence having at least 90% identity to the amino acid sequence set forth in SEQ ID NO: 70, and at least one RNA molecule comprises a sequence selected from the group consisting of SEQ ID NOs: 1702-1729,
wherein the CRISPR nuclease comprises a sequence having at least 90% identity to the amino acid sequence set forth in SEQ ID NO: 71, and at least one RNA molecule comprises a sequence selected from the group consisting of SEQ ID NOs: 1730-1747,
wherein the CRISPR nuclease comprises a sequence having at least 90% identity to the amino acid sequence set forth in SEQ ID NO: 72, and at least one RNA molecule comprises a sequence selected from the group consisting of SEQ ID NOs: 1748-1774,
wherein the CRISPR nuclease comprises a sequence having at least 90% identity to the amino acid sequence set forth in SEQ ID NO: 73, and at least one RNA molecule comprises a sequence selected from the group consisting of SEQ ID NOs: 1775-1801,
wherein the CRISPR nuclease comprises a sequence having at least 90% identity to the amino acid sequence set forth in SEQ ID NO: 74, and at least one RNA molecule comprises a sequence selected from the group consisting of SEQ ID NOs: 1802-1828,
wherein the CRISPR nuclease comprises a sequence having at least 90% identity to the amino acid sequence set forth in SEQ ID NO: 75, and at least one RNA molecule comprises a sequence selected from the group consisting of SEQ ID NOs: 1829-1844,
wherein the CRISPR nuclease comprises a sequence having at least 90% identity to the amino acid sequence set forth in SEQ ID NO: 76, and at least one RNA molecule comprises a sequence selected from the group consisting of SEQ ID NOs: 1845-1870,
wherein the CRISPR nuclease comprises a sequence having at least 90% identity to the amino acid sequence set forth in SEQ ID NO: 77, and at least one RNA molecule comprises a sequence selected from the group consisting of SEQ ID NOs: 1871-1895,
wherein the CRISPR nuclease comprises a sequence having at least 90% identity to the amino acid sequence set forth in SEQ ID NO: 78, and at least one RNA molecule comprises a sequence selected from the group consisting of SEQ ID NOs: 1896-1911,
wherein the CRISPR nuclease comprises a sequence having at least 90% identity to the amino acid sequence set forth in SEQ ID NO: 79, and at least one RNA molecule comprises a sequence selected from the group consisting of SEQ ID NOs: 1912-1930,
wherein the CRISPR nuclease comprises a sequence having at least 90% identity to the amino acid sequence set forth in SEQ ID NO: 80, and at least one RNA molecule comprises a sequence selected from the group consisting of SEQ ID NOs: 1931-1942,
wherein the CRISPR nuclease comprises a sequence having at least 90% identity to the amino acid sequence set forth in SEQ ID NO: 81, and at least one RNA molecule comprises a sequence selected from the group consisting of SEQ ID NOs: 1943-1971,
wherein the CRISPR nuclease comprises a sequence having at least 90% identity to the amino acid sequence set forth in SEQ ID NO: 82, and at least one RNA molecule comprises a sequence selected from the group consisting of SEQ ID NOs: 1972-1999,
wherein the CRISPR nuclease comprises a sequence having at least 90% identity to the amino acid sequence set forth in SEQ ID NO: 83, and at least one RNA molecule comprises a sequence selected from the group consisting of SEQ ID NOs: 2000-2024,
wherein the CRISPR nuclease comprises a sequence having at least 90% identity to the amino acid sequence set forth in SEQ ID NO: 84, and at least one RNA molecule comprises a sequence selected from the group consisting of SEQ ID NOs: 2025-2045,
wherein the CRISPR nuclease comprises a sequence having at least 90% identity to the amino acid sequence set forth in SEQ ID NO: 85, and at least one RNA molecule comprises a sequence selected from the group consisting of SEQ ID NOs: 2046-2063,
wherein the CRISPR nuclease comprises a sequence having at least 90% identity to the amino acid sequence set forth in SEQ ID NO: 86, and at least one RNA molecule comprises a sequence selected from the group consisting of SEQ ID NOs: 2064-2088,
wherein the CRISPR nuclease comprises a sequence having at least 90% identity to the amino acid sequence set forth in SEQ ID NO: 87, and at least one RNA molecule comprises a sequence selected from the group consisting of SEQ ID NOs: 2089-2109,
wherein the CRISPR nuclease comprises a sequence having at least 90% identity to the amino acid sequence set forth in SEQ ID NO: 88, and at least one RNA molecule comprises a sequence selected from the group consisting of SEQ ID NOs: 2110-2131,
wherein the CRISPR nuclease comprises a sequence having at least 90% identity to the amino acid sequence set forth in SEQ ID NO: 89, and at least one RNA molecule comprises a sequence selected from the group consisting of SEQ ID NOs: 2132-2156,
wherein the CRISPR nuclease comprises a sequence having at least 90% identity to the amino acid sequence set forth in SEQ ID NO: 90, and at least one RNA molecule comprises a sequence selected from the group consisting of SEQ ID NOs: 2157-2178,
wherein the CRISPR nuclease comprises a sequence having at least 90% identity to the amino acid sequence set forth in SEQ ID NO: 91, and at least one RNA molecule comprises a sequence selected from the group consisting of SEQ ID NOs: 2179-2203,
wherein the CRISPR nuclease comprises a sequence having at least 90% identity to the amino acid sequence set forth in SEQ ID NO: 92, and at least one RNA molecule comprises a sequence selected from the group consisting of SEQ ID NOs: 2204-2230,
wherein the CRISPR nuclease comprises a sequence having at least 90% identity to the amino acid sequence set forth in SEQ ID NO: 93, and at least one RNA molecule comprises a sequence selected from the group consisting of SEQ ID NOs: 2231-2256,
wherein the CRISPR nuclease comprises a sequence having at least 90% identity to the amino acid sequence set forth in SEQ ID NO: 94, and at least one RNA molecule comprises a sequence selected from the group consisting of SEQ ID NOs: 2257-2277,
wherein the CRISPR nuclease comprises a sequence having at least 90% identity to the amino acid sequence set forth in SEQ ID NO: 95, and at least one RNA molecule comprises a sequence selected from the group consisting of SEQ ID NOs: 2278-2304,
wherein the CRISPR nuclease comprises a sequence having at least 90% identity to the amino acid sequence set forth in SEQ ID NO: 96, and at least one RNA molecule comprises a sequence selected from the group consisting of SEQ ID NOs: 2305-2333,
wherein the CRISPR nuclease comprises a sequence having at least 90% identity to the amino acid sequence set forth in SEQ ID NO: 97, and at least one RNA molecule comprises a sequence selected from the group consisting of SEQ ID NOs: 2334-2349,
wherein the CRISPR nuclease comprises a sequence having at least 90% identity to the amino acid sequence set forth in SEQ ID NO: 98, and at least one RNA molecule comprises a sequence selected from the group consisting of SEQ ID NOs: 2350-2368,
wherein the CRISPR nuclease comprises a sequence having at least 90% identity to the amino acid sequence set forth in SEQ ID NO: 99, and at least one RNA molecule comprises a sequence selected from the group consisting of SEQ ID NOs: 2369-2390,
wherein the CRISPR nuclease comprises a sequence having at least 90% identity to the amino acid sequence set forth in SEQ ID NO: 100, and at least one RNA molecule comprises a sequence selected from the group consisting of SEQ ID NOs: 2391-2411, wherein the CRISPR nuclease comprises a sequence having at least 90% identity to the amino acid sequence set forth in SEQ ID NO: 101, and at least one RNA molecule comprises a sequence selected from the group consisting of SEQ ID NOs: 2412-2436,
wherein the CRISPR nuclease comprises a sequence having at least 90% identity to the amino acid sequence set forth in SEQ ID NO: 102, and at least one RNA molecule comprises a sequence selected from the group consisting of SEQ ID NOs: 2437-2452,
wherein the CRISPR nuclease comprises a sequence having at least 90% identity to the amino acid sequence set forth in SEQ ID NO: 103, and at least one RNA molecule comprises a sequence selected from the group consisting of SEQ ID NOs: 24523-2468,
wherein the CRISPR nuclease comprises a sequence having at least 90% identity to the amino acid sequence set forth in SEQ ID NO: 104, and at least one RNA molecule comprises a sequence selected from the group consisting of SEQ ID NOs: 2469-2484,
wherein the CRISPR nuclease comprises a sequence having at least 90% identity to the amino acid sequence set forth in SEQ ID NO: 105, and at least one RNA molecule comprises a sequence selected from the group consisting of SEQ ID NOs: 2485-2500,
wherein the CRISPR nuclease comprises a sequence having at least 90% identity to the amino acid sequence set forth in SEQ ID NO: 106, and at least one RNA molecule comprises a sequence selected from the group consisting of SEQ ID NOs: 2501-2536,
wherein the CRISPR nuclease comprises a sequence having at least 90% identity to the amino acid sequence set forth in SEQ ID NO: 107, and at least one RNA molecule comprises a sequence selected from the group consisting of SEQ ID NOs: 2537-2552, or
wherein the CRISPR nuclease comprises a sequence having at least 90% identity to the amino acid sequence set forth in SEQ ID NO: 108, and at least one RNA molecule comprises a sequence selected from the group consisting of SEQ ID NOs: 2553-2574.

8. The composition of claim 7, wherein the CRISPR nuclease comprises a sequence having at least 90% identity to the amino acid sequence set forth in SEQ ID NO: 1 and at least one RNA molecule is a CRISPR RNA (crRNA) molecule comprising a guide sequence portion and a sequence selected from the group consisting of SEQ ID NOs: 326-329,
wherein the CRISPR nuclease comprises a sequence having at least 90% identity to the amino acid sequence set forth in SEQ ID NO: 2 and at least one RNA molecule is a CRISPR RNA (crRNA) molecule comprising a guide sequence portion and a sequence selected from the group consisting of SEQ ID NOs: 340-343,
wherein the CRISPR nuclease comprises a sequence having at least 90% identity to the amino acid sequence set forth in SEQ ID NO: 3 and at least one RNA molecule is a CRISPR RNA (crRNA) molecule comprising a guide sequence portion and a sequence selected from the group consisting of SEQ ID NOs: 354-357,
wherein the CRISPR nuclease comprises a sequence having at least 90% identity to the amino acid sequence set forth in SEQ ID NO: 4 and at least one RNA molecule is a CRISPR RNA (crRNA) molecule comprising a guide sequence portion and a sequence selected from the group consisting of SEQ ID NOs: 370-373 and 114,
wherein the CRISPR nuclease comprises a sequence having at least 90% identity to the amino acid sequence set forth in SEQ ID NO: 5 and at least one RNA molecule is a CRISPR RNA (crRNA) molecule comprising a guide sequence portion and a sequence selected from the group consisting of SEQ ID NOs: 382-385,
wherein the CRISPR nuclease comprises a sequence having at least 90% identity to the amino acid sequence set forth in SEQ ID NO: 6 and at least one RNA molecule is a CRISPR RNA (crRNA) molecule comprising a guide sequence portion and a sequence selected from the group consisting of SEQ ID NOs: 397-400,
wherein the CRISPR nuclease comprises a sequence having at least 90% identity to the amino acid sequence set forth in SEQ ID NO: 7 and at least one RNA molecule is a CRISPR RNA (crRNA) molecule comprising a guide sequence portion and a sequence selected from the group consisting of SEQ ID NOs: 411-414,
wherein the CRISPR nuclease comprises a sequence having at least 90% identity to the amino acid sequence set forth in SEQ ID NO: 8 and at least one RNA molecule is a CRISPR RNA (crRNA) molecule comprising a guide sequence portion and a sequence selected from the group consisting of SEQ ID NOs: 435-437,
wherein the CRISPR nuclease comprises a sequence having at least 90% identity to the amino acid sequence set forth in SEQ ID NO: 9 and at least one RNA molecule is a CRISPR RNA (crRNA) molecule comprising a guide sequence portion and a sequence selected from the group consisting of SEQ ID NOs: 449-452,
wherein the CRISPR nuclease comprises a sequence having at least 90% identity to the amino acid sequence set forth in SEQ ID NO: 10 and at least one RNA molecule is a CRISPR RNA (crRNA) molecule comprising a guide sequence portion and a sequence selected from the group consisting of SEQ ID NOs: 463-466,
wherein the CRISPR nuclease comprises a sequence having at least 90% identity to the amino acid sequence set forth in SEQ ID NO: 11 and at least one RNA molecule is a CRISPR RNA (crRNA) molecule comprising a guide sequence portion and a sequence selected from the group consisting of SEQ ID NOs: 477-480,
wherein the CRISPR nuclease comprises a sequence having at least 90% identity to the amino acid sequence set forth in SEQ ID NO: 12 and at least one RNA molecule is a CRISPR RNA (crRNA) molecule comprising a guide sequence portion and a sequence selected from the group consisting of SEQ ID NOs: 493-496 and 509-512,
wherein the CRISPR nuclease comprises a sequence having at least 90% identity to the amino acid sequence set forth in SEQ ID NO: 14 and at least one RNA molecule is a CRISPR RNA (crRNA) molecule comprising a guide sequence portion and a sequence selected from the group consisting of SEQ ID NOs: 537-540,
wherein the CRISPR nuclease comprises a sequence having at least 90% identity to the amino acid sequence set forth in SEQ ID NO: 15 and at least one RNA molecule is a CRISPR RNA (crRNA) molecule comprising a guide sequence portion and a sequence selected from the group consisting of SEQ ID NOs: 551-553,
wherein the CRISPR nuclease comprises a sequence having at least 90% identity to the amino acid sequence set forth in SEQ ID NO: 16 and at least one RNA molecule is a CRISPR RNA (crRNA) molecule comprising a guide sequence portion and a sequence selected from the group consisting of SEQ ID NOs: 577-580,
wherein the CRISPR nuclease comprises a sequence having at least 90% identity to the amino acid sequence set forth in SEQ ID NO: 17 and at least one RNA molecule is a CRISPR RNA (crRNA) molecule comprising a guide sequence portion and a sequence selected from the group consisting of SEQ ID NOs: 600-603 and 201,
wherein the CRISPR nuclease comprises a sequence having at least 90% identity to the amino acid sequence set forth in SEQ ID NO: 18 and at least one RNA molecule is a CRISPR RNA (crRNA) molecule comprising a guide sequence portion and a sequence selected from the group consisting of SEQ ID NOs: 614-617 and 630,
wherein the CRISPR nuclease comprises a sequence having at least 90% identity to the amino acid sequence set forth in SEQ ID NO: 19 and at least one RNA molecule is a CRISPR RNA (crRNA) molecule comprising a guide sequence portion and a sequence selected from the group consisting of SEQ ID NOs: 635-638,
wherein the CRISPR nuclease comprises a sequence having at least 90% identity to the amino acid sequence set forth in SEQ ID NO: 20 and at least one RNA molecule is a CRISPR RNA (crRNA) molecule comprising a guide sequence portion and a sequence selected from the group consisting of SEQ ID NOs: 653-656,
wherein the CRISPR nuclease comprises a sequence having at least 90% identity to the amino acid sequence set forth in SEQ ID NO: 21 and at least one RNA molecule is a CRISPR RNA (crRNA) molecule comprising a guide sequence portion and a sequence selected from the group consisting of SEQ ID NOs: 667-670 and 680,
wherein the CRISPR nuclease comprises a sequence having at least 90% identity to the amino acid sequence set forth in SEQ ID NO: 22 and at least one RNA molecule is a CRISPR RNA (crRNA) molecule comprising a guide sequence portion and a sequence selected from the group consisting of SEQ ID NOs: 685-688,
wherein the CRISPR nuclease comprises a sequence having at least 90% identity to the amino acid sequence set forth in SEQ ID NO: 23 and at least one RNA molecule is a CRISPR RNA (crRNA) molecule comprising a guide sequence portion and a sequence selected from the group consisting of SEQ ID NOs: 709-712 and 721-724,
wherein the CRISPR nuclease comprises a sequence having at least 90% identity to the amino acid sequence set forth in SEQ ID NO: 24 and at least one RNA molecule is a CRISPR RNA (crRNA) molecule comprising a guide sequence portion and a sequence selected from the group consisting of SEQ ID NOs: 730-733,
wherein the CRISPR nuclease comprises a sequence having at least 90% identity to the amino acid sequence set forth in SEQ ID NO: 25 and at least one RNA molecule is a CRISPR RNA (crRNA) molecule comprising a guide sequence portion and a sequence selected from the group consisting of SEQ ID NOs: 744-747,
wherein the CRISPR nuclease comprises a sequence having at least 90% identity to the amino acid sequence set forth in SEQ ID NO: 26 and at least one RNA molecule is a CRISPR RNA (crRNA) molecule comprising a guide sequence portion and a sequence selected from the group consisting of SEQ ID NOs: 763-766,
wherein the CRISPR nuclease comprises a sequence having at least 90% identity to the amino acid sequence set forth in SEQ ID NO: 27 and at least one RNA molecule is a CRISPR RNA (crRNA) molecule comprising a guide sequence portion and a sequence selected from the group consisting of SEQ ID NOs: 777-780,
wherein the CRISPR nuclease comprises a sequence having at least 90% identity to the amino acid sequence set forth in SEQ ID NO: 28 and at least one RNA molecule is a CRISPR RNA (crRNA) molecule comprising a guide sequence portion and a sequence selected from the group consisting of SEQ ID NOs: 800-803,
wherein the CRISPR nuclease comprises a sequence having at least 90% identity to the amino acid sequence set forth in SEQ ID NO: 29 and at least one RNA molecule is a CRISPR RNA (crRNA) molecule comprising a guide sequence portion and a sequence selected from the group consisting of SEQ ID NOs: 818-821,
wherein the CRISPR nuclease comprises a sequence having at least 90% identity to the amino acid sequence set forth in SEQ ID NO: 30 and at least one RNA molecule is a CRISPR RNA (crRNA) molecule comprising a guide sequence portion and a sequence selected from the group consisting of SEQ ID NOs: 832-835,
wherein the CRISPR nuclease comprises a sequence having at least 90% identity to the amino acid sequence set forth in SEQ ID NO: 31 and at least one RNA molecule is a CRISPR RNA (crRNA) molecule comprising a guide sequence portion and a sequence selected from the group consisting of SEQ ID NOs: 846-849,
wherein the CRISPR nuclease comprises a sequence having at least 90% identity to the amino acid sequence set forth in SEQ ID NO: 32 and at least one RNA molecule is a CRISPR RNA (crRNA) molecule comprising a guide sequence portion and a sequence selected from the group consisting of SEQ ID NOs: 864-867 and 880-883,
wherein the CRISPR nuclease comprises a sequence having at least 90% identity to the amino acid sequence set forth in SEQ ID NO: 33 and at least one RNA molecule is a CRISPR RNA (crRNA) molecule comprising a guide sequence portion and a sequence selected from the group consisting of SEQ ID NOs: 885-888 and 898,
wherein the CRISPR nuclease comprises a sequence having at least 90% identity to the amino acid sequence set forth in SEQ ID NO: 34 and at least one RNA molecule is a CRISPR RNA (crRNA) molecule comprising a guide sequence portion and a sequence selected from the group consisting of SEQ ID NOs: 903-906,
wherein the CRISPR nuclease comprises a sequence having at least 90% identity to the amino acid sequence set forth in SEQ ID NO: 35 and at least one RNA molecule is a CRISPR RNA (crRNA) molecule comprising a guide sequence portion and a sequence selected from the group consisting of SEQ ID NOs: 917-920 and 931,
wherein the CRISPR nuclease comprises a sequence having at least 90% identity to the amino acid sequence set forth in SEQ ID NO: 36 and at least one RNA molecule is a CRISPR RNA (crRNA) molecule comprising a guide sequence portion and a sequence selected from the group consisting of SEQ ID NOs: 933-936,
wherein the CRISPR nuclease comprises a sequence having at least 90% identity to the amino acid sequence set forth in SEQ ID NO: 37 and at least one RNA molecule is a CRISPR RNA (crRNA) molecule comprising a guide sequence portion and a sequence selected from the group consisting of SEQ ID NOs: 949-952,
wherein the CRISPR nuclease comprises a sequence having at least 90% identity to the amino acid sequence set forth in SEQ ID NO: 38 and at least one RNA molecule is a CRISPR RNA (crRNA) molecule comprising a guide sequence portion and a sequence selected from the group consisting of SEQ ID NOs: 964-967 and 978-981,
wherein the CRISPR nuclease comprises a sequence having at least 90% identity to the amino acid sequence set forth in SEQ ID NO: 39 and at least one RNA molecule is a CRISPR RNA (crRNA) molecule comprising a guide sequence portion and a sequence selected from the group consisting of SEQ ID NOs: 987-990 and 1001-1004,
wherein the CRISPR nuclease comprises a sequence having at least 90% identity to the amino acid sequence set forth in SEQ ID NO: 40 and at least one RNA molecule is a CRISPR RNA (crRNA) molecule comprising a guide sequence portion and a sequence selected from the group consisting of SEQ ID NOs: 1012-1015 and 1026-1029,
wherein the CRISPR nuclease comprises a sequence having at least 90% identity to the amino acid sequence set forth in SEQ ID NO: 41 and at least one RNA molecule is a CRISPR RNA (crRNA) molecule comprising a guide sequence portion and a sequence selected from the group consisting of SEQ ID NOs: 1031-1034 and 1044-1047,
wherein the CRISPR nuclease comprises a sequence having at least 90% identity to the amino acid sequence set forth in SEQ ID NO: 42 and at least one RNA molecule is a CRISPR RNA (crRNA) molecule comprising a guide sequence portion and a sequence selected from the group consisting of SEQ ID NOs: 1052-1055 and 1068-1071,
wherein the CRISPR nuclease comprises a sequence having at least 90% identity to the amino acid sequence set forth in SEQ ID NO: 43 and at least one RNA molecule is a CRISPR RNA (crRNA) molecule comprising a guide sequence portion and a sequence selected from the group consisting of SEQ ID NOs: 1082-1085 and 1095-1098,
wherein the CRISPR nuclease comprises a sequence having at least 90% identity to the amino acid sequence set forth in SEQ ID NO: 44 and at least one RNA molecule is a CRISPR RNA (crRNA) molecule comprising a guide sequence portion and a sequence selected from the group consisting of SEQ ID NOs: 1103-1106,
wherein the CRISPR nuclease comprises a sequence having at least 90% identity to the amino acid sequence set forth in SEQ ID NO: 45 and at least one RNA molecule is a CRISPR RNA (crRNA) molecule comprising a guide sequence portion and a sequence selected from the group consisting of SEQ ID NOs: 1117-1120,
wherein the CRISPR nuclease comprises a sequence having at least 90% identity to the amino acid sequence set forth in SEQ ID NO: 46 and at least one RNA molecule is a CRISPR RNA (crRNA) molecule comprising a guide sequence portion and a sequence selected from the group consisting of SEQ ID NOs: 1137-1140 and 1151-1154,
wherein the CRISPR nuclease comprises a sequence having at least 90% identity to the amino acid sequence set forth in SEQ ID NO: 47 and at least one RNA molecule is a CRISPR RNA (crRNA) molecule comprising a guide sequence portion and a sequence selected from the group consisting of SEQ ID NOs: 1169-1172,
wherein the CRISPR nuclease comprises a sequence having at least 90% identity to the amino acid sequence set forth in SEQ ID NO: 48 and at least one RNA molecule is a CRISPR RNA (crRNA) molecule comprising a guide sequence portion and a sequence selected from the group consisting of SEQ ID NOs: 1188-1191 and 1204-1207,
wherein the CRISPR nuclease comprises a sequence having at least 90% identity to the amino acid sequence set forth in SEQ ID NO: 49 and at least one RNA molecule is a CRISPR RNA (crRNA) molecule comprising a guide sequence portion and a sequence selected from the group consisting of SEQ ID NOs: 1213-1216 and 1227-1230,
wherein the CRISPR nuclease comprises a sequence having at least 90% identity to the amino acid sequence set forth in SEQ ID NO: 50 and at least one RNA molecule is a CRISPR RNA (crRNA) molecule comprising a guide sequence portion and a sequence selected from the group consisting of SEQ ID NOs: 1245-1247,
wherein the CRISPR nuclease comprises a sequence having at least 90% identity to the amino acid sequence set forth in SEQ ID NO: 51 and at least one RNA molecule is a CRISPR RNA (crRNA) molecule comprising a guide sequence portion and a sequence selected from the group consisting of SEQ ID NOs: 1257-1260 and 1271-1274,
wherein the CRISPR nuclease comprises a sequence having at least 90% identity to the amino acid sequence set forth in SEQ ID NO: 52 and at least one RNA molecule is a CRISPR RNA (crRNA) molecule comprising a guide sequence portion and a sequence selected from the group consisting of SEQ ID NOs: 1286-1289,
wherein the CRISPR nuclease comprises a sequence having at least 90% identity to the amino acid sequence set forth in SEQ ID NO: 53 and at least one RNA molecule is a CRISPR RNA (crRNA) molecule comprising a guide sequence portion and a sequence selected from the group consisting of SEQ ID NOs: 1300-1303,
wherein the CRISPR nuclease comprises a sequence having at least 90% identity to the amino acid sequence set forth in SEQ ID NO: 54 and at least one RNA molecule is a CRISPR RNA (crRNA) molecule comprising a guide sequence portion and a sequence selected from the group consisting of SEQ ID NOs: 177 and 178,
wherein the CRISPR nuclease comprises a sequence having at least 90% identity to the amino acid sequence set forth in SEQ ID NO: 55 and at least one RNA molecule is a CRISPR RNA (crRNA) molecule comprising a guide sequence portion and a sequence selected from the group consisting of SEQ ID NOs: 1344-1347,
wherein the CRISPR nuclease comprises a sequence having at least 90% identity to the amino acid sequence set forth in SEQ ID NO: 56 and at least one RNA molecule is a CRISPR RNA (crRNA) molecule comprising a guide sequence portion and a sequence selected from the group consisting of SEQ ID NOs: 1364-1367,
wherein the CRISPR nuclease comprises a sequence having at least 90% identity to the amino acid sequence set forth in SEQ ID NO: 57 and at least one RNA molecule is a CRISPR RNA (crRNA) molecule comprising a guide sequence portion and a sequence selected from the group consisting of SEQ ID NOs: 1380-1383,
wherein the CRISPR nuclease comprises a sequence having at least 90% identity to the amino acid sequence set forth in SEQ ID NO: 58 and at least one RNA molecule is a CRISPR RNA (crRNA) molecule comprising a guide sequence portion and a sequence selected from the group consisting of SEQ ID NOs: 1399-1402,
wherein the CRISPR nuclease comprises a sequence having at least 90% identity to the amino acid sequence set forth in SEQ ID NO: 59 and at least one RNA molecule is a CRISPR RNA (crRNA) molecule comprising a guide sequence portion and a sequence selected from the group consisting of SEQ ID NOs: 1415-1418 and 1431-1434,
wherein the CRISPR nuclease comprises a sequence having at least 90% identity to the amino acid sequence set forth in SEQ ID NO: 60 and at least one RNA molecule is a CRISPR RNA (crRNA) molecule comprising a guide sequence portion and a sequence selected from the group consisting of SEQ ID NOs: 1439-1442 and 1455-1458,
wherein the CRISPR nuclease comprises a sequence having at least 90% identity to the amino acid sequence set forth in SEQ ID NO: 61 and at least one RNA molecule is a CRISPR RNA (crRNA) molecule comprising a guide sequence portion and a sequence selected from the group consisting of SEQ ID NOs: 1464-1467 and 1478-1481,
wherein the CRISPR nuclease comprises a sequence having at least 90% identity to the amino acid sequence set forth in SEQ ID NO: 62 and at least one RNA molecule is a CRISPR RNA (crRNA) molecule comprising a guide sequence portion and a sequence selected from the group consisting of SEQ ID NOs: 1497-1500 and 1515-1518,
wherein the CRISPR nuclease comprises a sequence having at least 90% identity to the amino acid sequence set forth in SEQ ID NO: 63 and at least one RNA molecule is a CRISPR RNA (crRNA) molecule comprising a guide sequence portion and a sequence selected from the group consisting of SEQ ID NOs: 1535-1538,
wherein the CRISPR nuclease comprises a sequence having at least 90% identity to the amino acid sequence set forth in SEQ ID NO: 64 and at least one RNA molecule is a CRISPR RNA (crRNA) molecule comprising a guide sequence portion and a sequence selected from the group consisting of SEQ ID NOs: 1558-1561,
wherein the CRISPR nuclease comprises a sequence having at least 90% identity to the amino acid sequence set forth in SEQ ID NO: 65 and at least one RNA molecule is a CRISPR RNA (crRNA) molecule comprising a guide sequence portion and a sequence selected from the group consisting of SEQ ID NOs: 1574-1577 and 1592-1595,
wherein the CRISPR nuclease comprises a sequence having at least 90% identity to the amino acid sequence set forth in SEQ ID NO: 66 and at least one RNA molecule is a CRISPR RNA (crRNA) molecule comprising a guide sequence portion and a sequence selected from the group consisting of SEQ ID NOs: 1619-1622,
wherein the CRISPR nuclease comprises a sequence having at least 90% identity to the amino acid sequence set forth in SEQ ID NO: 67 and at least one RNA molecule is a CRISPR RNA (crRNA) molecule comprising a guide sequence portion and a sequence selected from the group consisting of SEQ ID NOs: 1636-1639,
wherein the CRISPR nuclease comprises a sequence having at least 90% identity to the amino acid sequence set forth in SEQ ID NO: 68 and at least one RNA molecule is a CRISPR RNA (crRNA) molecule comprising a guide sequence portion and a sequence selected from the group consisting of SEQ ID NOs: 1657-1660,
wherein the CRISPR nuclease comprises a sequence having at least 90% identity to the amino acid sequence set forth in SEQ ID NO: 69 and at least one RNA molecule is a CRISPR RNA (crRNA) molecule comprising a guide sequence portion and a sequence selected from the group consisting of SEQ ID NOs: 1676-1679,
wherein the CRISPR nuclease comprises a sequence having at least 90% identity to the amino acid sequence set forth in SEQ ID NO: 70 and at least one RNA molecule is a CRISPR RNA (crRNA) molecule comprising a guide sequence portion and a sequence selected from the group consisting of SEQ ID NOs: 1703-1706,
wherein the CRISPR nuclease comprises a sequence having at least 90% identity to the amino acid sequence set forth in SEQ ID NO: 71 and at least one RNA molecule is a CRISPR RNA (crRNA) molecule comprising a guide sequence portion and a sequence selected from the group consisting of SEQ ID NOs: 1731-1734,
wherein the CRISPR nuclease comprises a sequence having at least 90% identity to the amino acid sequence set forth in SEQ ID NO: 72 and at least one RNA molecule is a CRISPR RNA (crRNA) molecule comprising a guide sequence portion and a sequence selected from the group consisting of SEQ ID NOs: 1749-1752,
wherein the CRISPR nuclease comprises a sequence having at least 90% identity to the amino acid sequence set forth in SEQ ID NO: 73 and at least one RNA molecule is a CRISPR RNA (crRNA) molecule comprising a guide sequence portion and a sequence selected from the group consisting of SEQ ID NOs: 1776-1779 and 1792-1795,
wherein the CRISPR nuclease comprises a sequence having at least 90% identity to the amino acid sequence set forth in SEQ ID NO: 74 and at least one RNA molecule is a CRISPR RNA (crRNA) molecule comprising a guide sequence portion and a sequence selected from the group consisting of SEQ ID NOs: 1803-1806,
wherein the CRISPR nuclease comprises a sequence having at least 90% identity to the amino acid sequence set forth in SEQ ID NO: 75 and at least one RNA molecule is a CRISPR RNA (crRNA) molecule comprising a guide sequence portion and a sequence selected from the group consisting of SEQ ID NOs: 1830-1833,
wherein the CRISPR nuclease comprises a sequence having at least 90% identity to the amino acid sequence set forth in SEQ ID NO: 76 and at least one RNA molecule is a CRISPR RNA (crRNA) molecule comprising a guide sequence portion and a sequence selected from the group consisting of SEQ ID NOs: 1846-1849,
wherein the CRISPR nuclease comprises a sequence having at least 90% identity to the amino acid sequence set forth in SEQ ID NO: 77 and at least one RNA molecule is a CRISPR RNA (crRNA) molecule comprising a guide sequence portion and a sequence selected from the group consisting of SEQ ID NOs: 1872-1875 and 1888-1891,
wherein the CRISPR nuclease comprises a sequence having at least 90% identity to the amino acid sequence set forth in SEQ ID NO: 78 and at least one RNA molecule is a CRISPR RNA (crRNA) molecule comprising a guide sequence portion and a sequence selected from the group consisting of SEQ ID NOs: 1897-1900,
wherein the CRISPR nuclease comprises a sequence having at least 90% identity to the amino acid sequence set forth in SEQ ID NO: 79 and at least one RNA molecule is a CRISPR RNA (crRNA) molecule comprising a guide sequence portion and a sequence selected from the group consisting of SEQ ID NOs: 1913-1916,
wherein the CRISPR nuclease comprises a sequence having at least 90% identity to the amino acid sequence set forth in SEQ ID NO: 80 and at least one RNA molecule is a CRISPR RNA (crRNA) molecule comprising a guide sequence portion and a sequence selected from the group consisting of SEQ ID NOs: 1932-1934,
wherein the CRISPR nuclease comprises a sequence having at least 90% identity to the amino acid sequence set forth in SEQ ID NO: 81 and at least one RNA molecule is a CRISPR RNA (crRNA) molecule comprising a guide sequence portion and a sequence selected from the group consisting of SEQ ID NOs: 1944-1947 and 1960-1963,
wherein the CRISPR nuclease comprises a sequence having at least 90% identity to the amino acid sequence set forth in SEQ ID NO: 82 and at least one RNA molecule is a CRISPR RNA (crRNA) molecule comprising a guide sequence portion and a sequence selected from the group consisting of SEQ ID NOs: 1973-1976,
wherein the CRISPR nuclease comprises a sequence having at least 90% identity to the amino acid sequence set forth in SEQ ID NO: 83 and at least one RNA molecule is a CRISPR RNA (crRNA) molecule comprising a guide sequence portion and a sequence selected from the group consisting of SEQ ID NOs: 2001-2004,
wherein the CRISPR nuclease comprises a sequence having at least 90% identity to the amino acid sequence set forth in SEQ ID NO: 84 and at least one RNA molecule is a CRISPR RNA (crRNA) molecule comprising a guide sequence portion and a sequence selected from the group consisting of SEQ ID NOs: 2026-2029,
wherein the CRISPR nuclease comprises a sequence having at least 90% identity to the amino acid sequence set forth in SEQ ID NO: 85 and at least one RNA molecule is a CRISPR RNA (crRNA) molecule comprising a guide sequence portion and a sequence selected from the group consisting of SEQ ID NOs: 2047-2050,
wherein the CRISPR nuclease comprises a sequence having at least 90% identity to the amino acid sequence set forth in SEQ ID NO: 86 and at least one RNA molecule is a CRISPR RNA (crRNA) molecule comprising a guide sequence portion and a sequence selected from the group consisting of SEQ ID NOs: 2065-2068,
wherein the CRISPR nuclease comprises a sequence having at least 90% identity to the amino acid sequence set forth in SEQ ID NO: 87 and at least one RNA molecule is a CRISPR RNA (crRNA) molecule comprising a guide sequence portion and a sequence selected from the group consisting of SEQ ID NOs: 2090-2093,
wherein the CRISPR nuclease comprises a sequence having at least 90% identity to the amino acid sequence set forth in SEQ ID NO: 88 and at least one RNA molecule is a CRISPR RNA (crRNA) molecule comprising a guide sequence portion and a sequence selected from the group consisting of SEQ ID NOs: 2111-2114,
wherein the CRISPR nuclease comprises a sequence having at least 90% identity to the amino acid sequence set forth in SEQ ID NO: 89 and at least one RNA molecule is a CRISPR RNA (crRNA) molecule comprising a guide sequence portion and a sequence selected from the group consisting of SEQ ID NOs: 2133-2136,
wherein the CRISPR nuclease comprises a sequence having at least 90% identity to the amino acid sequence set forth in SEQ ID NO: 90 and at least one RNA molecule is a CRISPR RNA (crRNA) molecule comprising a guide sequence portion and a sequence selected from the group consisting of SEQ ID NOs: 2158-2161,
wherein the CRISPR nuclease comprises a sequence having at least 90% identity to the amino acid sequence set forth in SEQ ID NO: 91 and at least one RNA molecule is a CRISPR RNA (crRNA) molecule comprising a guide sequence portion and a sequence selected from the group consisting of SEQ ID NOs: 2180-2183,
wherein the CRISPR nuclease comprises a sequence having at least 90% identity to the amino acid sequence set forth in SEQ ID NO: 92 and at least one RNA molecule is a CRISPR RNA (crRNA) molecule comprising a guide sequence portion and a sequence selected from the group consisting of SEQ ID NOs: 2205-2208,
wherein the CRISPR nuclease comprises a sequence having at least 90% identity to the amino acid sequence set forth in SEQ ID NO: 93 and at least one RNA molecule is a CRISPR RNA (crRNA) molecule comprising a guide sequence portion and a sequence selected from the group consisting of SEQ ID NOs: 2232-2235,
wherein the CRISPR nuclease comprises a sequence having at least 90% identity to the amino acid sequence set forth in SEQ ID NO: 94 and at least one RNA molecule is a CRISPR RNA (crRNA) molecule comprising a guide sequence portion and a sequence selected from the group consisting of SEQ ID NOs: 2258-2261,
wherein the CRISPR nuclease comprises a sequence having at least 90% identity to the amino acid sequence set forth in SEQ ID NO: 95 and at least one RNA molecule is a CRISPR RNA (crRNA) molecule comprising a guide sequence portion and a sequence selected from the group consisting of SEQ ID NOs: 2279-2282,
wherein the CRISPR nuclease comprises a sequence having at least 90% identity to the amino acid sequence set forth in SEQ ID NO: 96 and at least one RNA molecule is a CRISPR RNA (crRNA) molecule comprising a guide sequence portion and a sequence selected from the group consisting of SEQ ID NOs: 2306-2309,
wherein the CRISPR nuclease comprises a sequence having at least 90% identity to the amino acid sequence set forth in SEQ ID NO: 97 and at least one RNA molecule is a CRISPR RNA (crRNA) molecule comprising a guide sequence portion and a sequence selected from the group consisting of SEQ ID NOs: 2335-2338,
wherein the CRISPR nuclease comprises a sequence having at least 90% identity to the amino acid sequence set forth in SEQ ID NO: 98 and at least one RNA molecule is a CRISPR RNA (crRNA) molecule comprising a guide sequence portion and a sequence selected from the group consisting of SEQ ID NOs: 2351-2354,
wherein the CRISPR nuclease comprises a sequence having at least 90% identity to the amino acid sequence set forth in SEQ ID NO: 99 and at least one RNA molecule is a CRISPR RNA (crRNA) molecule comprising a guide sequence portion and a sequence selected from the group consisting of SEQ ID NOs: 2370-2373,
wherein the CRISPR nuclease comprises a sequence having at least 90% identity to the amino acid sequence set forth in SEQ ID NO: 100 and at least one RNA molecule is a CRISPR RNA (crRNA) molecule comprising a guide sequence portion and a sequence selected from the group consisting of SEQ ID NOs: 2392-2395,
wherein the CRISPR nuclease comprises a sequence having at least 90% identity to the amino acid sequence set forth in SEQ ID NO: 101 and at least one RNA molecule is a CRISPR RNA (crRNA) molecule comprising a guide sequence portion and a sequence selected from the group consisting of SEQ ID NOs: 2413-2416 and 2429-2432,
wherein the CRISPR nuclease comprises a sequence having at least 90% identity to the amino acid sequence set forth in SEQ ID NO: 102 and at least one RNA molecule is a CRISPR RNA (crRNA) molecule comprising a guide sequence portion and a sequence selected from the group consisting of SEQ ID NOs: 2438-2441,
wherein the CRISPR nuclease comprises a sequence having at least 90% identity to the amino acid sequence set forth in SEQ ID NO: 103 and at least one RNA molecule is a CRISPR RNA (crRNA) molecule comprising a guide sequence portion and a sequence selected from the group consisting of SEQ ID NOs: 2454-2457,
wherein the CRISPR nuclease comprises a sequence having at least 90% identity to the amino acid sequence set forth in SEQ ID NO: 104 and at least one RNA molecule is a CRISPR RNA (crRNA) molecule comprising a guide sequence portion and a sequence selected from the group consisting of SEQ ID NOs: 2470-2473,
wherein the CRISPR nuclease comprises a sequence having at least 90% identity to the amino acid sequence set forth in SEQ ID NO: 105 and at least one RNA molecule is a CRISPR RNA (crRNA) molecule comprising a guide sequence portion and a sequence selected from the group consisting of SEQ ID NOs: 2486-2489,
wherein the CRISPR nuclease comprises a sequence having at least 90% identity to the amino acid sequence set forth in SEQ ID NO: 106 and at least one RNA molecule is a CRISPR RNA (crRNA) molecule comprising a guide sequence portion and a sequence selected from the group consisting of SEQ ID NOs: 2502-2505 and 2520-2523,
wherein the CRISPR nuclease comprises a sequence having at least 90% identity to the amino acid sequence set forth in SEQ ID NO: 107 and at least one RNA molecule is a CRISPR RNA (crRNA) molecule comprising a guide sequence portion and a sequence selected from the group consisting of SEQ ID NOs: 2538-2541, or
wherein the CRISPR nuclease comprises a sequence having at least 90% identity to the amino acid sequence set forth in SEQ ID NO: 108 and at least one RNA molecule is a CRISPR RNA (crRNA) molecule comprising a guide sequence portion and a sequence selected from the group consisting of SEQ ID NOs: 2554-2557.

9. The composition of claim 8, further comprising
a transactivating CRISPR RNA (tracrRNA) molecule comprising a sequence set forth in the group consisting of SEQ ID NOs: 330-338,
a transactivating CRISPR RNA (tracrRNA) molecule comprising a sequence set forth in the group consisting of SEQ ID NOs: 344-352,
a transactivating CRISPR RNA (tracrRNA) molecule comprising a sequence set forth in the group consisting of SEQ ID NOs: 358-368,
a transactivating CRISPR RNA (tracrRNA) molecule comprising a sequence set forth in the group consisting of SEQ ID NOs: 374-380,
a transactivating CRISPR RNA (tracrRNA) molecule comprising a sequence set forth in the group consisting of SEQ ID NOs: 386-395,
a transactivating CRISPR RNA (tracrRNA) molecule comprising a sequence set forth in the group consisting of SEQ ID NOs: 401-409
a transactivating CRISPR RNA (tracrRNA) molecule comprising a sequence set forth in the group consisting of SEQ ID NOs: 415-433,
a transactivating CRISPR RNA (tracrRNA) molecule comprising a sequence set forth in the group consisting of SEQ ID NOs: 438-447,
a transactivating CRISPR RNA (tracrRNA) molecule comprising a sequence set forth in the group consisting of SEQ ID NOs: 453-461,
a transactivating CRISPR RNA (tracrRNA) molecule comprising a sequence set forth in the group consisting of SEQ ID NOs: 467-475,
a transactivating CRISPR RNA (tracrRNA) molecule comprising a sequence set forth in the group consisting of SEQ ID NOs: 481-491,
a transactivating CRISPR RNA (tracrRNA) molecule comprising a sequence set forth in the group consisting of SEQ ID NOs: 497-507,
a transactivating CRISPR RNA (tracrRNA) molecule comprising a sequence set forth in the group consisting of SEQ ID NOs: 541-549,
a transactivating CRISPR RNA (tracrRNA) molecule comprising a sequence set forth in the group consisting of SEQ ID NOs: 554-563, 565-569, and 571-575,
a transactivating CRISPR RNA (tracrRNA) molecule comprising a sequence set forth in the group consisting of SEQ ID NOs: 581-589 and 591-598,
a transactivating CRISPR RNA (tracrRNA) molecule comprising a sequence set forth in the group consisting of SEQ ID NOs: 604-612,
a transactivating CRISPR RNA (tracrRNA) molecule comprising a sequence set forth in the group consisting of SEQ ID NOs: 618-628 and 631-633,
a transactivating CRISPR RNA (tracrRNA) molecule comprising a sequence set forth in the group consisting of SEQ ID NOs: 639-647 and 649-651,
a transactivating CRISPR RNA (tracrRNA) molecule comprising a sequence set forth in the group consisting of SEQ ID NOs: 657-665,
a transactivating CRISPR RNA (tracrRNA) molecule comprising a sequence set forth in the group consisting of SEQ ID NOs: 671-678, 681-683, and UUGCUACAA,
a transactivating CRISPR RNA (tracrRNA) molecule comprising a sequence set forth in the group consisting of SEQ ID NOs: 689-697, 699-703, and 705-707,
a transactivating CRISPR RNA (tracrRNA) molecule comprising a sequence set forth in the group consisting of SEQ ID NOs: 713-719 and 725-728,
a transactivating CRISPR RNA (tracrRNA) molecule comprising a sequence set forth in the group consisting of SEQ ID NOs: 734-742,
a transactivating CRISPR RNA (tracrRNA) molecule comprising a sequence set forth in the group consisting of SEQ ID NOs: 748-756 and 758-761,
a transactivating CRISPR RNA (tracrRNA) molecule comprising a sequence set forth in the group consisting of SEQ ID NOs: 767-775,
a transactivating CRISPR RNA (tracrRNA) molecule comprising a sequence set forth in the group consisting of SEQ ID NOs: 781-789, 791-794, and 796-798,
a transactivating CRISPR RNA (tracrRNA) molecule comprising a sequence set forth in the group consisting of SEQ ID NOs: 804-812 and 814-816,
a transactivating CRISPR RNA (tracrRNA) molecule comprising a sequence set forth in the group consisting of SEQ ID NOs: 822-830,
a transactivating CRISPR RNA (tracrRNA) molecule comprising a sequence set forth in the group consisting of SEQ ID NOs: 836-844,
a transactivating CRISPR RNA (tracrRNA) molecule comprising a sequence set forth in the group consisting of SEQ ID NOs: 850-858 and 860-862,
a transactivating CRISPR RNA (tracrRNA) molecule comprising a sequence set forth in the group consisting of SEQ ID NOs: 868-878,
a transactivating CRISPR RNA (tracrRNA) molecule comprising a sequence set forth in the group consisting of SEQ ID NOs: 889-896, 899-901, and UUACUACAA,
a transactivating CRISPR RNA (tracrRNA) molecule comprising a sequence set forth in the group consisting of SEQ ID NOs: 907-915,
a transactivating CRISPR RNA (tracrRNA) molecule comprising a sequence set forth in the group consisting of SEQ ID NOs: 921-929,
a transactivating CRISPR RNA (tracrRNA) molecule comprising a sequence set forth in the group consisting of SEQ ID NOs: 937-947,
a transactivating CRISPR RNA (tracrRNA) molecule comprising a sequence set forth in the group consisting of SEQ ID NOs: 953-962,
a transactivating CRISPR RNA (tracrRNA) molecule comprising a sequence set forth in the group consisting of SEQ ID NOs: 968-976 and 982-985,
a transactivating CRISPR RNA (tracrRNA) molecule comprising a sequence set forth in the group consisting of SEQ ID NOs: 991-999 and 1005-1010,
a transactivating CRISPR RNA (tracrRNA) molecule comprising a sequence set forth in the group consisting of SEQ ID NOs: 1016-1024,
a transactivating CRISPR RNA (tracrRNA) molecule comprising a sequence set forth in the group consisting of SEQ ID NOs: 1035-1042, 1048-1050, UUACUAAAA, and UUACUAGAA,
a transactivating CRISPR RNA (tracrRNA) molecule comprising a sequence set forth in the group consisting of SEQ ID NOs: 1056-1066, 1072-1074, and 1076-1079,
a transactivating CRISPR RNA (tracrRNA) molecule comprising a sequence set forth in the group consisting of SEQ ID NOs: 1086-1093, 1099-1101, UUACUAAAA, and UUACUAGAA,
a transactivating CRISPR RNA (tracrRNA) molecule comprising a sequence set forth in the group consisting of SEQ ID NOs: 1107-1115,
a transactivating CRISPR RNA (tracrRNA) molecule comprising a sequence set forth in the group consisting of SEQ ID NOs: 1121-1130 and 1132-1135,
a transactivating CRISPR RNA (tracrRNA) molecule comprising a sequence set forth in the group consisting of SEQ ID NOs: 1141-1149, 1155-1158, 1160-1163, and 1167-1167,
a transactivating CRISPR RNA (tracrRNA) molecule comprising a sequence set forth in the group consisting of SEQ ID NOs: 1173-1181 and 1183-1186,
a transactivating CRISPR RNA (tracrRNA) molecule comprising a sequence set forth in the group consisting of SEQ ID NOs: 1192-1202 and 1208-1211,
a transactivating CRISPR RNA (tracrRNA) molecule comprising a sequence set forth in the group consisting of SEQ ID NOs: 1217-1225, 1231-1234, 1236-1239, and 1241-1243,
a transactivating CRISPR RNA (tracrRNA) molecule comprising a sequence set forth in the group consisting of SEQ ID NOs: 1248-1255,
a transactivating CRISPR RNA (tracrRNA) molecule comprising a sequence set forth in the group consisting of SEQ ID NOs: 1261-1269, 1276-1279, and 1281-1284,
a transactivating CRISPR RNA (tracrRNA) molecule comprising a sequence set forth in the group consisting of SEQ ID NOs: 1290-1298,
a transactivating CRISPR RNA (tracrRNA) molecule comprising a sequence set forth in the group consisting of SEQ ID NOs: 1304-1312,
a transactivating CRISPR RNA (tracrRNA) molecule comprising a sequence set forth in the group consisting of SEQ ID NOs: 1314-1315 and 1334-1335,
a transactivating CRISPR RNA (tracrRNA) molecule comprising a sequence set forth in the group consisting of SEQ ID NOs: 1348-1356 and 1358-1362,
a transactivating CRISPR RNA (tracrRNA) molecule comprising a sequence set forth in the group consisting of SEQ ID NOs: 1368-1378,
a transactivating CRISPR RNA (tracrRNA) molecule comprising a sequence set forth in the group consisting of SEQ ID NOs: 1384-1394 and 1396-1397,
a transactivating CRISPR RNA (tracrRNA) molecule comprising a sequence set forth in the group consisting of SEQ ID NOs: 1403-1413,
a transactivating CRISPR RNA (tracrRNA) molecule comprising a sequence set forth in the group consisting of SEQ ID NOs: 1419-1429 and 1436-1437,
a transactivating CRISPR RNA (tracrRNA) molecule comprising a sequence set forth in the group consisting of SEQ ID NOs: 1443-1453 and 1459-1462,
a transactivating CRISPR RNA (tracrRNA) molecule comprising a sequence set forth in the group consisting of SEQ ID NOs: 1468-1476, 1482-1490, and 1492-1495,
a transactivating CRISPR RNA (tracrRNA) molecule comprising a sequence set forth in the group consisting of SEQ ID NOs: 1501-1513, 1519-1527, and 1529-1532,
a transactivating CRISPR RNA (tracrRNA) molecule comprising a sequence set forth in the group consisting of SEQ ID NOs: 1539-1549, 1551-1553, and 1555-1556,
a transactivating CRISPR RNA (tracrRNA) molecule comprising a sequence set forth in the group consisting of SEQ ID NOs: 1562-1572,
a transactivating CRISPR RNA (tracrRNA) molecule comprising a sequence set forth in the group consisting of SEQ ID NOs: 1578-1590, 1596-1605, 1607-1612, and 1614-1617,
a transactivating CRISPR RNA (tracrRNA) molecule comprising a sequence set forth in the group consisting of SEQ ID NOs: 1623-1631 and 1633-1634,
a transactivating CRISPR RNA (tracrRNA) molecule comprising a sequence set forth in the group consisting of SEQ ID NOs: 1640-1652 and 1654-1655,
a transactivating CRISPR RNA (tracrRNA) molecule comprising a sequence set forth in the group consisting of SEQ ID NOs: 1661-1671 and 1673-1674,
a transactivating CRISPR RNA (tracrRNA) molecule comprising a sequence set forth in the group consisting of SEQ ID NOs: 1680-1692, 1694-1697, and 1699-1701,
a transactivating CRISPR RNA (tracrRNA) molecule comprising a sequence set forth in the group consisting of SEQ ID NOs: 1707-1719, 1721-1722, 1724-1727, and 1729,
a transactivating CRISPR RNA (tracrRNA) molecule comprising a sequence set forth in the group consisting of SEQ ID NOs: 1735-1747,
a transactivating CRISPR RNA (tracrRNA) molecule comprising a sequence set forth in the group consisting of SEQ ID NOs: 1753-1763, 1765-1770, and 1772-1774,
a transactivating CRISPR RNA (tracrRNA) molecule comprising a sequence set forth in the group consisting of SEQ ID NOs: 1780-1790 and 1796-1801,
a transactivating CRISPR RNA (tracrRNA) molecule comprising a sequence set forth in the group consisting of SEQ ID NOs: 1807-1817, 1819-1820, 1822-1825, and 1827-1828,
a transactivating CRISPR RNA (tracrRNA) molecule comprising a sequence set forth in the group consisting of SEQ ID NOs: 1834-1844,
a transactivating CRISPR RNA (tracrRNA) molecule comprising a sequence set forth in the group consisting of SEQ ID NOs: 1850-1860, 1862-1863, 1685-1868, and 1870,
a transactivating CRISPR RNA (tracrRNA) molecule comprising a sequence set forth in the group consisting of SEQ ID NOs: 1876-1886 and 1892-1895,
a transactivating CRISPR RNA (tracrRNA) molecule comprising a sequence set forth in the group consisting of SEQ ID NOs: 1901-1911,
a transactivating CRISPR RNA (tracrRNA) molecule comprising a sequence set forth in the group consisting of SEQ ID NOs: 1917-1927 and 1929-1930,
a transactivating CRISPR RNA (tracrRNA) molecule comprising a sequence set forth in the group consisting of SEQ ID NOs: 1935-1942,
a transactivating CRISPR RNA (tracrRNA) molecule comprising a sequence set forth in the group consisting of SEQ ID NOs: 1948-1958 and 1964-1971,
a transactivating CRISPR RNA (tracrRNA) molecule comprising a sequence set forth in the group consisting of SEQ ID NOs: 1977-1989, 1991-1995, and 1997-1998,
a transactivating CRISPR RNA (tracrRNA) molecule comprising a sequence set forth in the group consisting of SEQ ID NOs: 2030-2042 and 2044-2045,
a transactivating CRISPR RNA (tracrRNA) molecule comprising a sequence set forth in the group consisting of SEQ ID NOs: 2051-2063,
a transactivating CRISPR RNA (tracrRNA) molecule comprising a sequence set forth in the group consisting of SEQ ID NOs: 2069-2081, 2083-2084, and 2086-2087,
a transactivating CRISPR RNA (tracrRNA) molecule comprising a sequence set forth in the group consisting of SEQ ID NOs: 2094-2106 and 2108-2109,
a transactivating CRISPR RNA (tracrRNA) molecule comprising a sequence set forth in the group consisting of SEQ ID NOs: 2115-2127, 2129, and 2131,
a transactivating CRISPR RNA (tracrRNA) molecule comprising a sequence set forth in the group consisting of SEQ ID NOs: 2137-2149, 2151-2152, and 2154-2155,
a transactivating CRISPR RNA (tracrRNA) molecule comprising a sequence set forth in the group consisting of SEQ ID NOs: 2162-2174 and 2176-2178,
a transactivating CRISPR RNA (tracrRNA) molecule comprising a sequence set forth in the group consisting of SEQ ID NOs: 2184-2192, 2194-2196, and 2198-2203,
a transactivating CRISPR RNA (tracrRNA) molecule comprising a sequence set forth in the group consisting of SEQ ID NOs: 2209-2221, 2223-2226, and 2228-2230,
a transactivating CRISPR RNA (tracrRNA) molecule comprising a sequence set forth in the group consisting of SEQ ID NOs: 2236-2248, 2250-2252, and 2254-2255,
a transactivating CRISPR RNA (tracrRNA) molecule comprising a sequence set forth in the group consisting of SEQ ID NOs: 2262-2274 and 2276-2277,
a transactivating CRISPR RNA (tracrRNA) molecule comprising a sequence set forth in the group consisting of SEQ ID NOs: 2283-2295, 2297-2299, and 2301-2304,
a transactivating CRISPR RNA (tracrRNA) molecule comprising a sequence set forth in the group consisting of SEQ ID NOs: 2310-2320, 2322-2325, 2327-2329, and 2331-2333,
a transactivating CRISPR RNA (tracrRNA) molecule comprising a sequence set forth in the group consisting of SEQ ID NOs: 2339-2349,
a transactivating CRISPR RNA (tracrRNA) molecule comprising a sequence set forth in the group consisting of SEQ ID NOs: 2355-2365 and 2367-2368,
a transactivating CRISPR RNA (tracrRNA) molecule comprising a sequence set forth in the group consisting of SEQ ID NOs: 2374-2384 and 2386-2390,
a transactivating CRISPR RNA (tracrRNA) molecule comprising a sequence set forth in the group consisting of SEQ ID NOs: 2396-2408 and 2410-2411,
a transactivating CRISPR RNA (tracrRNA) molecule comprising a sequence set forth in the group consisting of SEQ ID NOs: 2417-2427 and 2433-2436,
a transactivating CRISPR RNA (tracrRNA) molecule comprising a sequence set forth in the group consisting of SEQ ID NOs: 2442-2452,
a transactivating CRISPR RNA (tracrRNA) molecule comprising a sequence set forth in the group consisting of SEQ ID NOs: 2458-2468,
a transactivating CRISPR RNA (tracrRNA) molecule comprising a sequence set forth in the group consisting of SEQ ID NOs: 2474-2484,
a transactivating CRISPR RNA (tracrRNA) molecule comprising a sequence set forth in the group consisting of SEQ ID NOs: 2490-2500,
a transactivating CRISPR RNA (tracrRNA) molecule comprising a sequence set forth in the group consisting of SEQ ID NOs: 2506-2518, 2524-2529, 2531-2534, and 2536,
a transactivating CRISPR RNA (tracrRNA) molecule comprising a sequence set forth in the group consisting of SEQ ID NOs: 2542-2552, or
a transactivating CRISPR RNA (tracrRNA) molecule comprising a sequence set forth in the group consisting of SEQ ID NOs: 2558-2566, 2568-2570, and 2572-2574.

10. The composition of claim 2, wherein the CRISPR nuclease comprises a sequence having at least 90% identity to the amino acid sequence set forth in SEQ ID NO: 1 and at least one RNA molecule is a single-guide RNA (sgRNA) molecule comprising a guide sequence portion and a sequence selected from the group consisting of SEQ ID NOs: 325-338,
wherein the CRISPR nuclease comprises a sequence having at least 90% identity to the amino acid sequence set forth in SEQ ID NO: 2 and at least one RNA molecule is a single-guide RNA (sgRNA) molecule comprising a guide sequence portion and a sequence selected from the group consisting of SEQ ID NOs: 339-352,
wherein the CRISPR nuclease comprises a sequence having at least 90% identity to the amino acid sequence set forth in SEQ ID NO: 3 and at least one RNA molecule is a single-guide RNA (sgRNA) molecule comprising a guide sequence portion and a sequence selected from the group consisting of SEQ ID NOs: 353-368,
wherein the CRISPR nuclease comprises a sequence having at least 90% identity to the amino acid sequence set forth in SEQ ID NO: 4 and at least one RNA molecule is a single-guide RNA (sgRNA) molecule comprising a guide sequence portion and a sequence selected from the group consisting of SEQ ID NOs: 369-380,
wherein the CRISPR nuclease comprises a sequence having at least 90% identity to the amino acid sequence set forth in SEQ ID NO: 5 and at least one RNA molecule is a single-guide RNA (sgRNA) molecule comprising a guide sequence portion and a sequence selected from the group consisting of SEQ ID NOs: 381-395,
wherein the CRISPR nuclease comprises a sequence having at least 90% identity to the amino acid sequence set forth in SEQ ID NO: 6 and at least one RNA molecule is a single-guide RNA (sgRNA) molecule comprising a guide sequence portion and a sequence selected from the group consisting of SEQ ID NOs: 396-409,
wherein the CRISPR nuclease comprises a sequence having at least 90% identity to the amino acid sequence set forth in SEQ ID NO: 7 and at least one RNA molecule is a single-guide RNA (sgRNA) molecule comprising a guide sequence portion and a sequence selected from the group consisting of SEQ ID NOs: 410-433,
wherein the CRISPR nuclease comprises a sequence having at least 90% identity to the amino acid sequence set forth in SEQ ID NO: 8 and at least one RNA molecule is a single-guide RNA (sgRNA) molecule comprising a guide sequence portion and a sequence selected from the group consisting of SEQ ID NOs: 434-447,
wherein the CRISPR nuclease comprises a sequence having at least 90% identity to the amino acid sequence set forth in SEQ ID NO: 9 and at least one RNA molecule is a single-guide RNA (sgRNA) molecule comprising a guide sequence portion and a sequence selected from the group consisting of SEQ ID NOs: 448-461,
wherein the CRISPR nuclease comprises a sequence having at least 90% identity to the amino acid sequence set forth in SEQ ID NO: 10 and at least one RNA molecule is a single-guide RNA (sgRNA) molecule comprising a guide sequence portion and a sequence selected from the group consisting of SEQ ID NOs: 462-475,
wherein the CRISPR nuclease comprises a sequence having at least 90% identity to the amino acid sequence set forth in SEQ ID NO: 11 and at least one RNA molecule is a single-guide RNA (sgRNA) molecule comprising a guide sequence portion and a sequence selected from the group consisting of SEQ ID NOs: 476-491,
wherein the CRISPR nuclease comprises a sequence having at least 90% identity to the amino acid sequence set forth in SEQ ID NO: 12 and at least one RNA molecule is a single-guide RNA (sgRNA) molecule comprising a guide sequence portion and a sequence selected from the group consisting of SEQ ID NOs: 492-512,
wherein the CRISPR nuclease comprises a sequence having at least 90% identity to the amino acid sequence set forth in SEQ ID NO: 14 and at least one RNA molecule is a single-guide RNA (sgRNA) molecule comprising a guide sequence portion and a sequence selected from the group consisting of SEQ ID NOs: 536-549,
wherein the CRISPR nuclease comprises a sequence having at least 90% identity to the amino acid sequence set forth in SEQ ID NO: 15 and at least one RNA molecule is a single-guide RNA (sgRNA) molecule comprising a guide sequence portion and a sequence selected from the group consisting of SEQ ID NOs: 550-575,
wherein the CRISPR nuclease comprises a sequence having at least 90% identity to the amino acid sequence set forth in SEQ ID NO: 16 and at least one RNA molecule is a single-guide RNA (sgRNA) molecule comprising a guide sequence portion and a sequence selected from the group consisting of SEQ ID NOs: 576-598,
wherein the CRISPR nuclease comprises a sequence having at least 90% identity to the amino acid sequence set forth in SEQ ID NO: 17 and at least one RNA molecule is a single-guide RNA (sgRNA) molecule comprising a guide sequence portion and a sequence selected from the group consisting of SEQ ID NOs: 599-612,
wherein the CRISPR nuclease comprises a sequence having at least 90% identity to the amino acid sequence set forth in SEQ ID NO: 18 and at least one RNA molecule is a single-guide RNA (sgRNA) molecule comprising a guide sequence portion and a sequence selected from the group consisting of SEQ ID NOs: 613-633,
wherein the CRISPR nuclease comprises a sequence having at least 90% identity to the amino acid sequence set forth in SEQ ID NO: 19 and at least one RNA molecule is a single-guide RNA (sgRNA) molecule comprising a guide sequence portion and a sequence selected from the group consisting of SEQ ID NOs: 634-651,
wherein the CRISPR nuclease comprises a sequence having at least 90% identity to the amino acid sequence set forth in SEQ ID NO: 20 and at least one RNA molecule is a single-guide RNA (sgRNA) molecule comprising a guide sequence portion and a sequence selected from the group consisting of SEQ ID NOs: 652-665,
wherein the CRISPR nuclease comprises a sequence having at least 90% identity to the amino acid sequence set forth in SEQ ID NO: 21 and at least one RNA molecule is a single-guide RNA (sgRNA) molecule comprising a guide sequence portion and a sequence selected from the group consisting of SEQ ID NOs: 666-683 and UUGCUACAA,
wherein the CRISPR nuclease comprises a sequence having at least 90% identity to the amino acid sequence set forth in SEQ ID NO: 22 and at least one RNA molecule is a single-guide RNA (sgRNA) molecule comprising a guide sequence portion and a sequence selected from the group consisting of SEQ ID NOs: 684-707,
wherein the CRISPR nuclease comprises a sequence having at least 90% identity to the amino acid sequence set forth in SEQ ID NO: 23 and at least one RNA molecule is a single-guide RNA (sgRNA) molecule comprising a guide sequence portion and a sequence selected from the group consisting of SEQ ID NOs: 708-728,
wherein the CRISPR nuclease comprises a sequence having at least 90% identity to the amino acid sequence set forth in SEQ ID NO: 24 and at least one RNA molecule is a single-guide RNA (sgRNA) molecule comprising a guide sequence portion and a sequence selected from the group consisting of SEQ ID NOs: 729-742,
wherein the CRISPR nuclease comprises a sequence having at least 90% identity to the amino acid sequence set forth in SEQ ID NO: 25 and at least one RNA molecule is a single-guide RNA (sgRNA) molecule comprising a guide sequence portion and a sequence selected from the group consisting of SEQ ID NOs: 743-761,
wherein the CRISPR nuclease comprises a sequence having at least 90% identity to the amino acid sequence set forth in SEQ ID NO: 26 and at least one RNA molecule is a single-guide RNA (sgRNA) molecule comprising a guide sequence portion and a sequence selected from the group consisting of SEQ ID NOs: 762-775,
wherein the CRISPR nuclease comprises a sequence having at least 90% identity to the amino acid sequence set forth in SEQ ID NO: 27 and at least one RNA molecule is a single-guide RNA (sgRNA) molecule comprising a guide sequence portion and a sequence selected from the group consisting of SEQ ID NOs: 776-798,
wherein the CRISPR nuclease comprises a sequence having at least 90% identity to the amino acid sequence set forth in SEQ ID NO: 28 and at least one RNA molecule is a single-guide RNA (sgRNA) molecule comprising a guide sequence portion and a sequence selected from the group consisting of SEQ ID NOs: 799-816,
wherein the CRISPR nuclease comprises a sequence having at least 90% identity to the amino acid sequence set forth in SEQ ID NO: 29 and at least one RNA molecule is a single-guide RNA (sgRNA) molecule comprising a guide sequence portion and a sequence selected from the group consisting of SEQ ID NOs: 817-830,
wherein the CRISPR nuclease comprises a sequence having at least 90% identity to the amino acid sequence set forth in SEQ ID NO: 30 and at least one RNA molecule is a single-guide RNA (sgRNA) molecule comprising a guide sequence portion and a sequence selected from the group consisting of SEQ ID NOs: 831-844,
wherein the CRISPR nuclease comprises a sequence having at least 90% identity to the amino acid sequence set forth in SEQ ID NO: 31 and at least one RNA molecule is a single-guide RNA (sgRNA) molecule comprising a guide sequence portion and a sequence selected from the group consisting of SEQ ID NOs: 845-862,
wherein the CRISPR nuclease comprises a sequence having at least 90% identity to the amino acid sequence set forth in SEQ ID NO: 32 and at least one RNA molecule is a single-guide RNA (sgRNA) molecule comprising a guide sequence portion and a sequence selected from the group consisting of SEQ ID NOs: 863-883,
wherein the CRISPR nuclease comprises a sequence having at least 90% identity to the amino acid sequence set forth in SEQ ID NO: 33 and at least one RNA molecule is a single-guide RNA (sgRNA) molecule comprising a guide sequence portion and a sequence selected from the group consisting of SEQ ID NOs: 884-901 and UUACUACAA,
wherein the CRISPR nuclease comprises a sequence having at least 90% identity to the amino acid sequence set forth in SEQ ID NO: 34 and at least one RNA molecule is a single-guide RNA (sgRNA) molecule comprising a guide sequence portion and a sequence selected from the group consisting of SEQ ID NOs: 902-915,
wherein the CRISPR nuclease comprises a sequence having at least 90% identity to the amino acid sequence set forth in SEQ ID NO: 35 and at least one RNA molecule is a single-guide RNA (sgRNA) molecule comprising a guide sequence portion and a sequence selected from the group consisting of SEQ ID NOs: 916-931,
wherein the CRISPR nuclease comprises a sequence having at least 90% identity to the amino acid sequence set forth in SEQ ID NO: 36 and at least one RNA molecule is a single-guide RNA (sgRNA) molecule comprising a guide sequence portion and a sequence selected from the group consisting of SEQ ID NOs: 932-947,
wherein the CRISPR nuclease comprises a sequence having at least 90% identity to the amino acid sequence set forth in SEQ ID NO: 37 and at least one RNA molecule is a single-guide RNA (sgRNA) molecule comprising a guide sequence portion and a sequence selected from the group consisting of SEQ ID NOs: 948-962,
wherein the CRISPR nuclease comprises a sequence having at least 90% identity to the amino acid sequence set forth in SEQ ID NO: 38 and at least one RNA molecule is a single-guide RNA (sgRNA) molecule comprising a guide sequence portion and a sequence selected from the group consisting of SEQ ID NOs: 963-985,
wherein the CRISPR nuclease comprises a sequence having at least 90% identity to the amino acid sequence set forth in SEQ ID NO: 39 and at least one RNA molecule is a single-guide RNA (sgRNA) molecule comprising a guide sequence portion and a sequence selected from the group consisting of SEQ ID NOs: 986-1010,
wherein the CRISPR nuclease comprises a sequence having at least 90% identity to the amino acid sequence set forth in SEQ ID NO: 40 and at least one RNA molecule is a single-guide RNA (sgRNA) molecule comprising a guide sequence portion and a sequence selected from the group consisting of SEQ ID NOs: 1011-1029,
wherein the CRISPR nuclease comprises a sequence having at least 90% identity to the amino acid sequence set forth in SEQ ID NO: 41 and at least one RNA molecule is a single-guide RNA (sgRNA) molecule comprising a guide sequence portion and a sequence selected from the group consisting of SEQ ID NOs: 1030-1050, UUACUAAAA, and UUACUAGAA,
wherein the CRISPR nuclease comprises a sequence having at least 90% identity to the amino acid sequence set forth in SEQ ID NO: 42 and at least one RNA molecule is a single-guide RNA (sgRNA) molecule comprising a guide sequence portion and a sequence selected from the group consisting of SEQ ID NOs: 1051-1080,
wherein the CRISPR nuclease comprises a sequence having at least 90% identity to the amino acid sequence set forth in SEQ ID NO: 43 and at least one RNA molecule is a single-guide RNA (sgRNA) molecule comprising a guide sequence portion and a sequence selected from the group consisting of SEQ ID NOs: 1081-1101, UUACUAAAA, and UUACUAGAA,
wherein the CRISPR nuclease comprises a sequence having at least 90% identity to the amino acid sequence set forth in SEQ ID NO: 44 and at least one RNA molecule is a single-guide RNA (sgRNA) molecule comprising a guide sequence portion and a sequence selected from the group consisting of SEQ ID NOs: 1102-1115,
wherein the CRISPR nuclease comprises a sequence having at least 90% identity to the amino acid sequence set forth in SEQ ID NO: 45 and at least one RNA molecule is a single-guide RNA (sgRNA) molecule comprising a guide sequence portion and a sequence selected from the group consisting of SEQ ID NOs: 1116-1135,
wherein the CRISPR nuclease comprises a sequence having at least 90% identity to the amino acid sequence set forth in SEQ ID NO: 46 and at least one RNA molecule is a single-guide RNA (sgRNA) molecule comprising a guide sequence portion and a sequence selected from the group consisting of SEQ ID NOs: 1136-1167,
wherein the CRISPR nuclease comprises a sequence having at least 90% identity to the amino acid sequence set forth in SEQ ID NO: 47 and at least one RNA molecule is a single-guide RNA (sgRNA) molecule comprising a guide sequence portion and a sequence selected from the group consisting of SEQ ID NOs: 1168-1186,
wherein the CRISPR nuclease comprises a sequence having at least 90% identity to the amino acid sequence set forth in SEQ ID NO: 48 and at least one RNA molecule is a single-guide RNA (sgRNA) molecule comprising a guide sequence portion and a sequence selected from the group consisting of SEQ ID NOs: 1187-1211,
wherein the CRISPR nuclease comprises a sequence having at least 90% identity to the amino acid sequence set forth in SEQ ID NO: 49 and at least one RNA molecule is a single-guide RNA (sgRNA) molecule comprising a guide sequence portion and a sequence selected from the group consisting of SEQ ID NOs: 1212-1243,
wherein the CRISPR nuclease comprises a sequence having at least 90% identity to the amino acid sequence set forth in SEQ ID NO: 50 and at least one RNA molecule is a single-guide RNA (sgRNA) molecule comprising a guide sequence portion and a sequence selected from the group consisting of SEQ ID NOs: 1244-1255,
wherein the CRISPR nuclease comprises a sequence having at least 90% identity to the amino acid sequence set forth in SEQ ID NO: 51 and at least one RNA molecule is a single-guide RNA (sgRNA) molecule comprising a guide sequence portion and a sequence selected from the group consisting of SEQ ID NOs: 1256-1284,
wherein the CRISPR nuclease comprises a sequence having at least 90% identity to the amino acid sequence set forth in SEQ ID NO: 52 and at least one RNA molecule is a single-guide RNA (sgRNA) molecule comprising a guide sequence portion and a sequence selected from the group consisting of SEQ ID NOs: 1285-1298,
wherein the CRISPR nuclease comprises a sequence having at least 90% identity to the amino acid sequence set forth in SEQ ID NO: 53 and at least one RNA molecule is a single-guide RNA (sgRNA) molecule comprising a guide sequence portion and a sequence selected from the group consisting of SEQ ID NOs: 1299-1312,
wherein the CRISPR nuclease comprises a sequence having at least 90% identity to the amino acid sequence set forth in SEQ ID NO: 54 and at least one RNA molecule is a single-guide RNA (sgRNA) molecule comprising a guide sequence portion and a sequence selected from the group consisting of SEQ ID NOs: 1316-1326, 1328-1332, and 1336-1342,
wherein the CRISPR nuclease comprises a sequence having at least 90% identity to the amino acid sequence set forth in SEQ ID NO: 55 and at least one RNA molecule is a single-guide RNA (sgRNA) molecule comprising a guide sequence portion and a sequence selected from the group consisting of SEQ ID NOs: 1343-1362,
wherein the CRISPR nuclease comprises a sequence having at least 90% identity to the amino acid sequence set forth in SEQ ID NO: 56 and at least one RNA molecule is a single-guide RNA (sgRNA) molecule comprising a guide sequence portion and a sequence selected from the group consisting of SEQ ID NOs: 1363-1378,
wherein the CRISPR nuclease comprises a sequence having at least 90% identity to the amino acid sequence set forth in SEQ ID NO: 57 and at least one RNA molecule is a single-guide RNA (sgRNA) molecule comprising a guide sequence portion and a sequence selected from the group consisting of SEQ ID NOs: 1379-1397,
wherein the CRISPR nuclease comprises a sequence having at least 90% identity to the amino acid sequence set forth in SEQ ID NO: 58 and at least one RNA molecule is a single-guide RNA (sgRNA) molecule comprising a guide sequence portion and a sequence selected from the group consisting of SEQ ID NOs: 1398-1413,
wherein the CRISPR nuclease comprises a sequence having at least 90% identity to the amino acid sequence set forth in SEQ ID NO: 59 and at least one RNA molecule is a single-guide RNA (sgRNA) molecule comprising a guide sequence portion and a sequence selected from the group consisting of SEQ ID NOs: 1414-1437,
wherein the CRISPR nuclease comprises a sequence having at least 90% identity to the amino acid sequence set forth in SEQ ID NO: 60 and at least one RNA molecule is a single-guide RNA (sgRNA) molecule comprising a guide sequence portion and a sequence selected from the group consisting of SEQ ID NOs: 1438-1462,
wherein the CRISPR nuclease comprises a sequence having at least 90% identity to the amino acid sequence set forth in SEQ ID NO: 61 and at least one RNA molecule is a single-guide RNA (sgRNA) molecule comprising a guide sequence portion and a sequence selected from the group consisting of SEQ ID NOs: 1463-1495,
wherein the CRISPR nuclease comprises a sequence having at least 90% identity to the amino acid sequence set forth in SEQ ID NO: 62 and at least one RNA molecule is a single-guide RNA (sgRNA) molecule comprising a guide sequence portion and a sequence selected from the group consisting of SEQ ID NOs: 1496-1533,
wherein the CRISPR nuclease comprises a sequence having at least 90% identity to the amino acid sequence set forth in SEQ ID NO: 63 and at least one RNA molecule is a single-guide RNA (sgRNA) molecule comprising a guide sequence portion and a sequence selected from the group consisting of SEQ ID NOs: 1534-1556,
wherein the CRISPR nuclease comprises a sequence having at least 90% identity to the amino acid sequence set forth in SEQ ID NO: 64 and at least one RNA molecule is a single-guide RNA (sgRNA) molecule comprising a guide sequence portion and a sequence selected from the group consisting of SEQ ID NOs: 1557-1572,
wherein the CRISPR nuclease comprises a sequence having at least 90% identity to the amino acid sequence set forth in SEQ ID NO: 65 and at least one RNA molecule is a single-guide RNA (sgRNA) molecule comprising a guide sequence portion and a sequence selected from the group consisting of SEQ ID NOs: 1573-1617,
wherein the CRISPR nuclease comprises a sequence having at least 90% identity to the amino acid sequence set forth in SEQ ID NO: 66 and at least one RNA molecule is a single-guide RNA (sgRNA) molecule comprising a guide sequence portion and a sequence selected from the group consisting of SEQ ID NOs: 1618-1634,
wherein the CRISPR nuclease comprises a sequence having at least 90% identity to the amino acid sequence set forth in SEQ ID NO: 67 and at least one RNA molecule is a single-guide RNA (sgRNA) molecule comprising a guide sequence portion and a sequence selected from the group consisting of SEQ ID NOs: 1635-1655,
wherein the CRISPR nuclease comprises a sequence having at least 90% identity to the amino acid sequence set forth in SEQ ID NO: 68 and at least one RNA molecule is a single-guide RNA (sgRNA) molecule comprising a guide sequence portion and a sequence selected from the group consisting of SEQ ID NOs: 1656-1674,
wherein the CRISPR nuclease comprises a sequence having at least 90% identity to the amino acid sequence set forth in SEQ ID NO: 69 and at least one RNA molecule is a single-guide RNA (sgRNA) molecule comprising a guide sequence portion and a sequence selected from the group consisting of SEQ ID NOs: 1675-1701,
wherein the CRISPR nuclease comprises a sequence having at least 90% identity to the amino acid sequence set forth in SEQ ID NO: 70 and at least one RNA molecule is a single-guide RNA (sgRNA) molecule comprising a guide sequence portion and a sequence selected from the group consisting of SEQ ID NOs: 1702-1729,
wherein the CRISPR nuclease comprises a sequence having at least 90% identity to the amino acid sequence set forth in SEQ ID NO: 71 and at least one RNA molecule is a single-guide RNA (sgRNA) molecule comprising a guide sequence portion and a sequence selected from the group consisting of SEQ ID NOs: 1730-1747,
wherein the CRISPR nuclease comprises a sequence having at least 90% identity to the amino acid sequence set forth in SEQ ID NO: 72 and at least one RNA molecule is a single-guide RNA (sgRNA) molecule comprising a guide sequence portion and a sequence selected from the group consisting of SEQ ID NOs: 1748-1774,
wherein the CRISPR nuclease comprises a sequence having at least 90% identity to the amino acid sequence set forth in SEQ ID NO: 73 and at least one RNA molecule is a single-guide RNA (sgRNA) molecule comprising a guide sequence portion and a sequence selected from the group consisting of SEQ ID NOs: 1775-1801,
wherein the CRISPR nuclease comprises a sequence having at least 90% identity to the amino acid sequence set forth in SEQ ID NO: 74 and at least one RNA molecule is a single-guide RNA (sgRNA) molecule comprising a guide sequence portion and a sequence selected from the group consisting of SEQ ID NOs: 1802-1828,
wherein the CRISPR nuclease comprises a sequence having at least 90% identity to the amino acid sequence set forth in SEQ ID NO: 75 and at least one RNA molecule is a single-guide RNA (sgRNA) molecule comprising a guide sequence portion and a sequence selected from the group consisting of SEQ ID NOs: 1829-1844,
wherein the CRISPR nuclease comprises a sequence having at least 90% identity to the amino acid sequence set forth in SEQ ID NO: 76 and at least one RNA molecule is a single-guide RNA (sgRNA) molecule comprising a guide sequence portion and a sequence selected from the group consisting of SEQ ID NOs: 1845-1870,
wherein the CRISPR nuclease comprises a sequence having at least 90% identity to the amino acid sequence set forth in SEQ ID NO: 77 and at least one RNA molecule is a single-guide RNA (sgRNA) molecule comprising a guide sequence portion and a sequence selected from the group consisting of SEQ ID NOs: 1871-1895,
wherein the CRISPR nuclease comprises a sequence having at least 90% identity to the amino acid sequence set forth in SEQ ID NO: 78 and at least one RNA molecule is a single-guide RNA (sgRNA) molecule comprising a guide sequence portion and a sequence selected from the group consisting of SEQ ID NOs: 1896-1911,
wherein the CRISPR nuclease comprises a sequence having at least 90% identity to the amino acid sequence set forth in SEQ ID NO: 79 and at least one RNA molecule is a single-guide RNA (sgRNA) molecule comprising a guide sequence portion and a sequence selected from the group consisting of SEQ ID NOs: 1912-1930,
wherein the CRISPR nuclease comprises a sequence having at least 90% identity to the amino acid sequence set forth in SEQ ID NO: 80 and at least one RNA molecule is a single-guide RNA (sgRNA) molecule comprising a guide sequence portion and a sequence selected from the group consisting of SEQ ID NOs: 1931-1942,
wherein the CRISPR nuclease comprises a sequence having at least 90% identity to the amino acid sequence set forth in SEQ ID NO: 81 and at least one RNA molecule is a single-guide RNA (sgRNA) molecule comprising a guide sequence portion and a sequence selected from the group consisting of SEQ ID NOs: 1943-1971,
wherein the CRISPR nuclease comprises a sequence having at least 90% identity to the amino acid sequence set forth in SEQ ID NO: 82 and at least one RNA molecule is a single-guide RNA (sgRNA) molecule comprising a guide sequence portion and a sequence selected from the group consisting of SEQ ID NOs: 1972-1999,
wherein the CRISPR nuclease comprises a sequence having at least 90% identity to the amino acid sequence set forth in SEQ ID NO: 83 and at least one RNA molecule is a single-guide RNA (sgRNA) molecule comprising a guide sequence portion and a sequence selected from the group consisting of SEQ ID NOs: 2000-2024,
wherein the CRISPR nuclease comprises a sequence having at least 90% identity to the amino acid sequence set forth in SEQ ID NO: 84 and at least one RNA molecule is a single-guide RNA (sgRNA) molecule comprising a guide sequence portion and a sequence selected from the group consisting of SEQ ID NOs: 2025-2045,
wherein the CRISPR nuclease comprises a sequence having at least 90% identity to the amino acid sequence set forth in SEQ ID NO: 85 and at least one RNA molecule is a single-guide RNA (sgRNA) molecule comprising a guide sequence portion and a sequence selected from the group consisting of SEQ ID NOs: 2046-2063,
wherein the CRISPR nuclease comprises a sequence having at least 90% identity to the amino acid sequence set forth in SEQ ID NO: 86 and at least one RNA molecule is a single-guide RNA (sgRNA) molecule comprising a guide sequence portion and a sequence selected from the group consisting of SEQ ID NOs: 2064-2088,
wherein the CRISPR nuclease comprises a sequence having at least 90% identity to the amino acid sequence set forth in SEQ ID NO: 87 and at least one RNA molecule is a single-guide RNA (sgRNA) molecule comprising a guide sequence portion and a sequence selected from the group consisting of SEQ ID NOs: 2089-2109,
wherein the CRISPR nuclease comprises a sequence having at least 90% identity to the amino acid sequence set forth in SEQ ID NO: 88 and at least one RNA molecule is a single-guide RNA (sgRNA) molecule comprising a guide sequence portion and a sequence selected from the group consisting of SEQ ID NOs: 2110-2131,
wherein the CRISPR nuclease comprises a sequence having at least 90% identity to the amino acid sequence set forth in SEQ ID NO: 89 and at least one RNA molecule is a single-guide RNA (sgRNA) molecule comprising a guide sequence portion and a sequence selected from the group consisting of SEQ ID NOs: 2132-2156,
wherein the CRISPR nuclease comprises a sequence having at least 90% identity to the amino acid sequence set forth in SEQ ID NO: 90 and at least one RNA molecule is a single-guide RNA (sgRNA) molecule comprising a guide sequence portion and a sequence selected from the group consisting of SEQ ID NOs: 2157-2178,
wherein the CRISPR nuclease comprises a sequence having at least 90% identity to the amino acid sequence set forth in SEQ ID NO: 91 and at least one RNA molecule is a single-guide RNA (sgRNA) molecule comprising a guide sequence portion and a sequence selected from the group consisting of SEQ ID NOs: 2179-2203,
wherein the CRISPR nuclease comprises a sequence having at least 90% identity to the amino acid sequence set forth in SEQ ID NO: 92 and at least one RNA molecule is a single-guide RNA (sgRNA) molecule comprising a guide sequence portion and a sequence selected from the group consisting of SEQ ID NOs: 2204-2230,
wherein the CRISPR nuclease comprises a sequence having at least 90% identity to the amino acid sequence set forth in SEQ ID NO: 93 and at least one RNA molecule is a single-guide RNA (sgRNA) molecule comprising a guide sequence portion and a sequence selected from the group consisting of SEQ ID NOs: 2231-2256,
wherein the CRISPR nuclease comprises a sequence having at least 90% identity to the amino acid sequence set forth in SEQ ID NO: 94 and at least one RNA molecule is a single-guide RNA (sgRNA) molecule comprising a guide sequence portion and a sequence selected from the group consisting of SEQ ID NOs: 2257-2277,
wherein the CRISPR nuclease comprises a sequence having at least 90% identity to the amino acid sequence set forth in SEQ ID NO: 95 and at least one RNA molecule is a single-guide RNA (sgRNA) molecule comprising a guide sequence portion and a sequence selected from the group consisting of SEQ ID NOs: 2278-2304,
wherein the CRISPR nuclease comprises a sequence having at least 90% identity to the amino acid sequence set forth in SEQ ID NO: 96 and at least one RNA molecule is a single-guide RNA (sgRNA) molecule comprising a guide sequence portion and a sequence selected from the group consisting of SEQ ID NOs: 2305-2333,
wherein the CRISPR nuclease comprises a sequence having at least 90% identity to the amino acid sequence set forth in SEQ ID NO: 97 and at least one RNA molecule is a single-guide RNA (sgRNA) molecule comprising a guide sequence portion and a sequence selected from the group consisting of SEQ ID NOs: 2334-2349,
wherein the CRISPR nuclease comprises a sequence having at least 90% identity to the amino acid sequence set forth in SEQ ID NO: 98 and at least one RNA molecule is a single-guide RNA (sgRNA) molecule comprising a guide sequence portion and a sequence selected from the group consisting of SEQ ID NOs: 2350-2368,
wherein the CRISPR nuclease comprises a sequence having at least 90% identity to the amino acid sequence set forth in SEQ ID NO: 99 and at least one RNA molecule is a single-guide RNA (sgRNA) molecule comprising a guide sequence portion and a sequence selected from the group consisting of SEQ ID NOs: 2369-2390,
wherein the CRISPR nuclease comprises a sequence having at least 90% identity to the amino acid sequence set forth in SEQ ID NO: 100 and at least one RNA molecule is a single-guide RNA (sgRNA) molecule comprising a guide sequence portion and a sequence selected from the group consisting of SEQ ID NOs: 2391-2411,
wherein the CRISPR nuclease comprises a sequence having at least 90% identity to the amino acid sequence set forth in SEQ ID NO: 101 and at least one RNA molecule is a single-guide RNA (sgRNA) molecule comprising a guide sequence portion and a sequence selected from the group consisting of SEQ ID NOs: 2412-2436,
wherein the CRISPR nuclease comprises a sequence having at least 90% identity to the amino acid sequence set forth in SEQ ID NO: 102 and at least one RNA molecule is a single-guide RNA (sgRNA) molecule comprising a guide sequence portion and a sequence selected from the group consisting of SEQ ID NOs: 2437-2452,
wherein the CRISPR nuclease comprises a sequence having at least 90% identity to the amino acid sequence set forth in SEQ ID NO: 103 and at least one RNA molecule is a single-guide RNA (sgRNA) molecule comprising a guide sequence portion and a sequence selected from the group consisting of SEQ ID NOs: 24523-2468,
wherein the CRISPR nuclease comprises a sequence having at least 90% identity to the amino acid sequence set forth in SEQ ID NO: 104 and at least one RNA molecule is a single-guide RNA (sgRNA) molecule comprising a guide sequence portion and a sequence selected from the group consisting of SEQ ID NOs: 2469-2484,
wherein the CRISPR nuclease comprises a sequence having at least 90% identity to the amino acid sequence set forth in SEQ ID NO: 105 and at least one RNA molecule is a single-guide RNA (sgRNA) molecule comprising a guide sequence portion and a sequence selected from the group consisting of SEQ ID NOs: 2485-2500,
wherein the CRISPR nuclease comprises a sequence having at least 90% identity to the amino acid sequence set forth in SEQ ID NO: 106 and at least one RNA molecule is a single-guide RNA (sgRNA) molecule comprising a guide sequence portion and a sequence selected from the group consisting of SEQ ID NOs: 2501-2536,
wherein the CRISPR nuclease comprises a sequence having at least 90% identity to the amino acid sequence set forth in SEQ ID NO: 107 and at least one RNA molecule is a single-guide RNA (sgRNA) molecule comprising a guide sequence portion and a sequence selected from the group consisting of SEQ ID NOs: 2537-2552, or
wherein the CRISPR nuclease comprises a sequence having at least 90% identity to the amino acid sequence set forth in SEQ ID NO: 108 and at least one RNA molecule is a single-guide RNA (sgRNA) molecule comprising a guide sequence portion and a sequence selected from the group consisting of SEQ ID NOs: 2553-2574.

11. The composition of any one of claims 1-10, wherein the CRISPR nuclease is a nickase having an inactivated RuvC domain created by an amino acid substitution at a position provided for the CRISPR nuclease in column 5 of Table 1.

12. The composition of any one of claims 1-10, wherein the CRISPR nuclease is a nickase having an inactivated HNH domain created by an amino acid substitution at a position provided for the CRISPR nuclease in column 6 of Table 1.

13. The composition of any one of claims 1-10, wherein the CRISPR nuclease is a catalytically dead nuclease having an inactivated RuvC domain and an inactivated HNH domain created by substitutions at the positions provided for the CRISPR nuclease in column 7 of Table 1.

14. The composition of any one of claims 1-10, wherein the CRISPR nuclease utilizes a protospacer adjacent motif (PAM) sequence provided for the CRISPR nuclease in any one of columns 2-7 of Table 3.

15. A method of modifying a nucleotide sequence at a DNA target site in a cell-free system or the genome of a cell comprising introducing into the cell the composition of any one of claims 2-14.

16. The method of claim 15, wherein the CRISPR nuclease effects a DNA break in a DNA strand adjacent to a protospacer adjacent motif (PAM) sequence provided for the CRISPR nuclease in any one of columns 2-7 of Table 3, and/or effects a DNA break in a DNA strand adjacent to a sequence that is complementary to the PAM sequence.

17. The method of claim 15, wherein the CRISPR nuclease is a nickase having an inactivated RuvC domain created by an amino acid substitution at a position provided for the CRISPR nuclease in column 5 of Table 1, and effects a DNA break in a DNA strand adjacent to a sequence that is complementary to the PAM sequence.

18. The method of claim 15, wherein the CRISPR nuclease is a nickase having an inactivated HNH domain created by an amino acid substitution at a position provided for the CRISPR nuclease in column 6 of Table 1, and effects a DNA break in a DNA strand adjacent to the PAM sequence.

19. The method of any one of claims 15-18, wherein the cell is a eukaryotic cell or a prokaryotic cell.

20. The method of claim 19, wherein the cell is a mammalian cell or a human cell.

21. A composition, method, process, or use as disclosed herein.

The application's sequence listing, which the Patent Office published only in electronic form, follows.

SEQUENCE LISTING (2807 sequences)

SEQ ID NO: 1 - protein, 986 aa, unidentified
  REGION 1..986: note = Synthetic sequence or unknown origin
MEKRIFGFDIGIASLGWAVVDFDDAADPENNIYPTGKIVKSGVRCFPVAENPKDGSSLAQPRRQKRLLRRLCRRKARRMAGIKNLFVTNGLVGKDALFNEKSNIYKARENTDVWNLRVKALTEKLTTIEFIRVLTHLAKHRGFKSYRIAAEKADAESGKVLEAVKANRALLENGKTLAQIIVEKGGQKRNWKDKKGDATYANSIPRDEIERETRLIFERQRAFGLAAANEKLQRDFERIAFRFRPIAGVDKMIGKCQFEPDEPRAPKNAPSAEFFVAWTKINNCRVKDEDGRSRFLTQEEKETVFNLLKDQKEIKYSALRKALFAKRPDIKFADVEYNPKPVYDKKTGEIKEPPAPENLKFFSLKGWNELKRVIDVSAYPVETLDKIATVIATQKNDADISGELKQLGLPDSDIERLQGLQFKEFIRLSLKALYKILPEMMSGKKYNEACDAVGYDFKSTGESFAAQKGKFLPPIPESLATTVPTVNRAISQFRKVYNALAREYGTPDQINVELARDVYNDHDERKKIEARQKEYAEEKEKAKALAQSKTGIEDIGGRDLLKFRLYEQQDGKCVYSGEALDLRRLTEQDYCDVDHIIPYSRSLDNSQSNKVLCLSRENRQKSNKTPLEYINDPVKQAEFIARVKSMKGLNKAKKDRLLTRGFDEREVEFRDRNINDTRYMARYVMKYLDDCIDFSQSKAAIKDRVQSRNGALTDFLRHQWGLRKDRAENDRHHAQDAIVIACATNGYTQYLACLSKIFENKQAYANKYGEPWYKAFKQRVKQPWDGFYQDVQASLAEVFVSRPPRKNATGEVHQETIRTLNPDKPQYSEKDVKSGVKIRGGLANNGNMLRVDVFSRKNAKGKEQFYLVPIYLADGINPELPNKAIVANKPESEWIIMDETYAFKFSLYKDDLVKAKGKELYFGYFDGCDRSTGCFHIEAQDSSQYWKGLGARNLEYIKKYQVDPLGRYVEVKSETRLPLNIKKGNP

SEQ ID NO: 2 - protein, 996 aa, unidentified
  REGION 1..996: note = Synthetic sequence or unknown origin
MAEYTLGLDIGAKSVGWAVVENGTRARIVAMGVRVFPEGVDREKSGLEKSKGASRREARGARRTRRRRTLRRTALIAALRGAGLAPADDGELAGLLSEVDPYPLRAKGLDEPLTPHEFGRVLYHINQRRGFKSNSKSAKQKEDGEIAKQAGLLQAAIEAAGCRTVGEYFARTNPEENRIRGHYTFRSMYEREFDLLWAKQAVYHPDVLTDHLCQQIRDRVIFFQRPLKPTDALIGECGLEPGEKRCAKAAWCARRFRMLQDVNNLRIHNPDGREVCLSDGEREIVLREMQQKAKVTFSSIRKKLNLLETQEFNAEYEVDEKGGRREALAGDAFSATMRSKKVFGNKAWDAMDEARKVRLNEAFVELEDDELVEVLAGEYGLSAEQMEAAMKVPLERGYMSFSRKAIEKLLPLMEAGKRTDEALDAVYPGRNQRAEGVGVERLPMPEDLRNPIVNRALVEVRKVVNAIAREYGKPKRIRVEMARDVKGSAKERREKHYKMLDNERRNAEVREKLRQDIGIARPTRDDVIKYKLWEECGHTCPYTGKHISQTALFGPNPDFQVEHILPYSRSLDDSYMNKTLCEVRENRVKANRTPWEAYGGDEQRFEQILQRVKTLPWPKRQKFQANELEGLDACIQRELNDTRYISREVVRYLKMLGVIVTGTRGSVTAELRHQWGLNTILDPTGSGEKNRADHRHHAIDAVVTAVTSNEHLRRLAESKYGNRGDGFAPPWEEFREEVEENVRQINVSHRVRRKVSGELHEKTFYGPTSETGIYVYRKDLTALTPAMVAKIVDPVVREIVEERLRACKIDGQRDKKIPKEVWNEPLYMRTTKSDKKVLIKKVRIRDVFGKTISFRDGSGSVYKTAKPGSNHHVEIFEYTNETDKSGRPRRDAVVVSLFDAVQRSKRGEPVVCRDHGPGTRFVCSLAINEMVLMDNGSGEMDLYRVQKMDVSKTVYFRQHTAATLEDEGTLIRKAAHVFEGYKVVVDPLGRVYRAND

SEQ ID NO: 3 - protein, 998 aa, unidentified
  REGION 1..998: note = Synthetic sequence or unknown origin
MKRRVFGFDLGIASIGWAVVEFDNEYYDMETGEILADKVNGSGEIAQGTIVGCGVRTFPVAENPKDGSSLAAARREKRLARRACRRKARRKKGLQGLFAAKGLAESPAAFTDEICMRQIGGDVWNLRVKALQEKLSKEELARVLYHLANHRGFKSVRKAQEENDKDSGKVLSAIRANMALKEDGKSLAQIIVEKAGETGKKRNFSKVVKVNKKGEDVKEADYRNSIPRSEIEAELAMIFTKQKEYGIFTQDLYDDFVKIAFRQRGIKSVGDMVGNCTFEKDEKRSPKEAPTAEFFVAWSKINNLAVYEGDKKRELTPEERQTLFDVLKVTKDIKYKTIRSKVFKGKDIQFTCLNYSPKQKKNKNGELVTIDPEDVLFYNMKGWHKLQSIFKAEYSDIFNDIKKLDKAVTIIATEKEDVKIQEKLQELGYSQEKIDKFLTLSFDKFINLSLKALYKINPYLEKGEKYDKACANAGYDFKEITDKLVNEKGLLLAVIDKEKLTKVPVVNRTIAQFRKLYNAMVRQYGAPDQINIETGRDLKKSAEERKKIQKLQEENRDKNQSIKKQLLEWGVKDNGTNITKLRLYNEQQGKSIYSGNEIKIEQLFDDGYVEIDHILPYSRSWNNSQSNKVLVLARENQEKGNQTPFEYIGKSDAKSKEWTDFTSYVTSFASIEKHKKEKLLLETFNEREQEFRDRNANDNSYIALYVKRYLEDGIDFGKSLHTEIKNKVQVRSGNVTAFLRRQWGLEKDRTESDKHHAQDAIVIACAAQGMVQALSKISRKEGVVHTDAVHRKYAIAKPWDNFRNDVLTALEKVFVSRSPRKKASGEIHSETIYTLNEKKKQFEAKNAKSGFYVRGGIAGNGDMLRTDVFCKKNKKGKVQFYLVPIYKSNLGKELPNKAIVANKNEDEWTVIDESFSFMFSLFLDDLIKAQKDETVTFGYYKGVDRANAAITIEVHDRSQDNARIGTKTLDSIKKYQVNLLGEYFEVGGEKRQLLTHEE

SEQ ID NO: 4 - protein, 1013 aa, unidentified
  REGION 1..1013: note = Synthetic sequence or unknown origin
MGKRVYAFDLGKASIGFCAREDFNILELGSLIVDKDHAEVISNRDRRRVYKTLYAHKNREDFFNKLWSDCGLNILEKDDKKFTTEFSKPNDNTIYNSALLRIALLQDKQLEEWQIYKALHNAIQRRGYDADIAWANASSADEKDNIERVSRYTQDDKGIEIIKNEKFKYPCYYDALSLSLWEENNPAEYKKHLPLADITKVRTKGLVAPRAFVEKELTELFFKAQKQLPQLNKYSVEYFLYGQYGSAYATFRKPEQGKEKDYGVLGQKIPRFDNRIIAKCKLLPKRNVCKANTKENVSFTLLMKLKNLRFTDSLGNKCMLDSEAIKEIFNNWLIKANKNDILKLDTTITKKEIENVIGCKIQDKIEPLKANISGRSSFCRRACQIMNKIILEGIQNPATMDVAEFTDDINSDNGITEAEIREMLSKIGTWDNLYIPDNRYEMAELSSDDRQKTDFLIGKITNPIVRNRLQILRDKLLELKDKHGIPDSIIFEFIRDGADNSLYGAKKANDYLKNTKENEKENLEIKKELEDANAYSPSNFEKLKLLRMQGGACIYSGNKIGIGNFDECDIDHIFPRAKGGNDALYNRVLCYSKLNREKGDRTPYEWLSSDREEWAKYLLHLNDLKSSLGKKKFELLTCKPQDCEKLIESYNGLVETAQIAKVAQQLAAFIFGWGLQTEGDKRHLFVNNGSTTAAIRRRYGLNKILGNDIKKNRENDKHHALDAICISFSQDFKYDPKSKKDVIQDFTYDFVKNAIDKLIPYPYSNDKPFKGNTRPLETIYGYREYGEKKYITNKIDISTLEQKEKKIKTIIDETIKNDLLNKMNLSKEDWKNMLQNYIHPKKQTHVNKVMVIVSEGKLDFDKNGRARMNEYVDFGTKGVKNQFKHSKGHKGQILYYNEKGAIKVMPIYANQKTLDVKLKLLDMGCNLYKKGIIFSSGCLVEIPNDFEANVYYHLADNDGKDKLVPTKEKVNNGIFKIRTIMSDGKVKLENNNGIEILTNAATLVNANFHKYKI

SEQ ID NO: 5 - protein, 1016 aa, unidentified
  REGION 1..1016: note = Synthetic sequence or unknown origin
MKKILSLDIGISSIGNAVVELDDENFYGKILDAGVRIFSAAEQPSGDSLAAPRREARGARRRISRRSSRLYNIKKYLILNNFITQEQIENLYCSNKQIKDVWTLRKEALYRKLNNEEFYRILMHIAKRRGFKSIRKSEEAKKEGDLLKAIKQNYQEFENGQYKTIGEMFAEKDIKRNKREKYNNSIPRDLLQKEIEIIFETQRKLGSPLAKEETENFYLQTAFYQRPLQSMEDKIGYCSFEPDEKRAPKCAYTSEIFTAATKLVNLSITDELGECRVLCGDEIKQIIELAHKNTKVTYKQLKKELCLEDNILFNGLNYNKKDKNPEDSTLIELKNYHLIKKSIVNDKNLGKVYFEAIKYDKDLFNNIATVLTCEKSDESVIARMKEYFIDDKIIACVKDLSMSKTMHLSLKAMEKILPYMLEGYKYNEACELAGYNHHSISKNKTKQNFLPVLPQEELTTNPVVNRAISQTRKVVNSLIKRHGTFDYIIIEMARDLSKSFDERRKIKKAQEDFQNQKELARKRCIENGLNPDYPKSNLLKFRLWEEQGGYCIYSGKYIDPRKLSDQDYTDVDHIIPYSKSFDDSLNNKVLCLSDENRQKGNKIPYEYIGESKWYDFVQRIKTYNLKSAKYNRLIRKSYESEGFKSRNLNDTRYITKFIKDYIKENLDFGNNLKVETRNGSLTAFLRTQWGLIKNREENDRHHALDAIVLACSTQGMVQYLSTVSAKIENYNYTKDKKPRFKRPWATFKEDVELAISKIFVSRALRASVSGQLHDATIRSPKHLQDGFTVLKTPLEKINLQTLEKMYDKERNIKIYNLLKERLTKFNNDPKKAFEEPVYMPMSEEKLKQGQKPHLIKTIKIKDNSISGIKVHNGFAQNTSMPRVDVFTKKNKKGKNEYFLVPIYIADFGGELPNKAISTGKNRWIEITDDYTFCFSLYPNTLIAINPTGKPEDEFLGYYKGCDITTGTIKLDSHDRTIKDKRISTKTAAYIKKYQVGVLGDYHEVKHEKRLKLKGPK

SEQ ID NO: 6 - protein, 1024 aa, unidentified
  REGION 1..1024: note = Synthetic sequence or unknown origin
MITLGLDLGISSIGWAILSENAAKRELINWGSRIFEPGVEGTENEISAGKGVSRCANRRLKKALRTQYFRRRKRKKDLIDLLIANGLLPENVDSAFFAEIDKKLLMLFPVAERKHIGHVLPYFYRKAALDRVLEKYELGRALYHLAQRRGYLSNRKQELKEQDAAGVVKTRINELKQAISESGARTLGEYFTMVDPEVERIRSRYTERSMYQDEFRKICQTQREHISAELEEKLYKAVFHQLPLKSCKGLIGKCRLYPEHRRCSMEKHEAQLFRIYTSVNNLRITCKNQIRSLTEDERLKVIEILNGYSDIFTKSGKVTLAKLQKAAGLAKGEKFNLGDDEKEIYGNELNNILYRAFGDKAAEMQQAEQDKFFNDLRSIEKSHVLIKRLINYWQISEEKAEDIASIALPDNYCAYSLKALQEMLPDLAAGVTLPQWLKLNNHTQIADKEFELLPLLDDCSFELRNPIVHRVLTEMRRVVNSIVERYGKPDRIHVELARDLKATNKEREQITIRNRKREKERLAIAERIAKEAGLEKISRNDILKVMLADECDFTCPYSGEHFSMSDLLHGGLVHIEHIIPYSRSFDDSFANKTLCINKLNAQKSNNTPYEAFGGSAEYSEMLERVRHFKGPYAERKLELFELQKVEPAEFLERNLNDTRYASKLAMQYLAMLYGGMVDKTGKRRIYAIAGGCTALIRRAWGGNYLLGEGEKVRDDHRHHAIDAMTIALTTPGLVQEVAKMSPERRREFNDATQKFIDSSFYQQAHAMLDDCAVSHHVVNKMRGALHKETIYSKDYSNGENIRHERVELKALTAKDIKQIVDPAIKNIILDKLGVANDYEVTDAMLKIFGDEANYPAMLDRNGNPVNTIKKVRIARTVNTRTVGKGDGKREVANGANYILAIFAKLNEKGEETGWEGEVISLMDAVQKKQRNEPLFEKNRPGMKFKFSLQKGDIVKFTKDGEEILGIIRGVSLPQFYCCPIKDARKVQDLKADHCWFTPTISAAFNWKMQKYNMNVFGELQIAND

SEQ ID NO: 7 - protein, 1031 aa, unidentified
  REGION 1..1031: note = Synthetic sequence or unknown origin
MVKILGLDIGISSVGYSVIELDENKFNGKFLALGARIFTAAEQPKTGASLAAPRREARSARRRLSRRSCRLYNIRRLLLEKQFITQTEIAEIYDTHEQLTDVWDLRKEALNRKLDNKELYRILMHIAKRRGFKSVRKSEEAKREGELLKSIAETTEEFKQGKYRTIGEMFALKYTNGEAKRNKSGNYNKSIARDLLRQEIEIIFEMQRKLGSTIANNEIEKGYKEIAFYQRPLKTIEIKTPCPFEPEEKRAPKCAYTSEKFSALNKLVNLRLINDLGDTRFLASAEIKDAVRLANKLSKVTYKQLRKELYLDDEIRFLNLNYTKTDSKGQQVDPETAVLIEFKNYHSIRKALECNGNLGKIYFDSIKDDEDFFDNIAYVLTCEKTDESIEEKLKEYGYSAGVIDSIKELSMSKTSHLSLKAMKKLIPYMLDGKKYTEACELAGYKTENQNTAKQSLLPELSQEELTVNPVVNRAISQTRKVVNALIKKYGILDSIIIEMSRDLSKTATERRNIQKLQEEFKSEKEKARQRCLENGLNPDFPKSNLLKFRLWEEQGGFCVYSGKHIDPKRLSEQDYVDIDHIIPYSRSFDDSLNNKVLCLTDENRQKSNKIPYEYIGEDKWYDFVQRVKSYHLKQPKVNRLTKKKYEQEGFKSRNLNDTRYIAKFVKDYIKENLDFGNNLKVETRNGSLTAFLRNQWGLIKNRDESDKHHAQDAAVIACSTQGMVKFLSTVSAKLENYDYSKDKKPRFKRPWETFNQDLEYELSRVFVSRAAKKSFRGELHDATIRSVKHLDKGFTTVKKPIEQIDLKTLEQMFDKERNYKIYNLLKERLEQNNNNPQKAFQEPVYMPLSKEKEAKGQKPHRIKSIKIKDTGTSGVLVRGGLAKNASMPRVDVFTKKNKKGKNEYFLVPIYVSDFGKELPNKAITSKKDCWLEINDEYTFCFSLFPDTLIAINPTGKPEDEFLGYYKKCNISNGAIILDSHDRSIKEKGFGSKKLVYIKKYQVDILGDYHEVKQEKRLGIKPKQKGQQKDGV

SEQ ID NO: 8 - protein, 1035 aa, unidentified
  REGION 1..1035: note = Synthetic sequence or unknown origin
MEKVFAFDVGTASLGIAVRKDFDMIRYESLLLPQEAGGMDELREARRQYRTRLAHAAREAYWKRICEEAGIEVLHSRIHGDASLHIPSSPGDPRLEREFAAPGDETIYTSCLLRIKLLQGAKLEGWQVFKAVRSALQRRGFDRNVPWKNRAASKTNADDDSKTAKNAMEYEKMLLEIVNQQREYLYPCYFDAFQMGLWNPRNNQILLRPSKISNRARGYTPPRELVIAELSALLQNAAKLFPKLVGKIDEVLWGPGKEQYASFFAEKRNALHLKEGSAGDWESLLGQKIPRFDNRQPGKCALIPRFHVCQASDTAIIESTFLLKVKNLRVLSPEGKEVFFSPETIRVILDTARIKARAKREELRLAQADKEAIQAAVASAYKITKTDLKKTLRSMKYDILPGNEEVEAPKISGRARLSRPAAKIMRDLILSGESPRAFYQKLLQCPPKDIPGATLSDDLQFLLMMPDSWEGIHIPDMAGKKIQESAQSPDDLVRQLIAEQRSPIVRLRLEIFDRELKRLLDDPAIGKPDRIVMEFVRGDFLGEEKKRKLEAEIKRRHKENLEIRTTATEQGYSSGTDLLKLKLLKEQAYVCPYTGDVLSCFALEDLEVDHIVPRHGGKNGSDGFTNKVVTSRTTNQLKGARTPYEFLHGSGKWTAYCNRVMAMKVSKRKQRLLLSPDAEKLDQKYSDLCSTAWIARVFRDIAAVRCCWPEGAIGSERHIVVINGAITAALRRRYRIDSLLAPECKSADEIEKKNRDDKRHHALDAMVLTFTTFWMRNPALRDKLALPDKIDRYYFQKYIDEVNPRNIIFPRAGLEKTIYGKREIDGQSKMTKREDIVSFGIDNKGKFVEKSVLSNFRDVCDEKLRSYLQTSFANAKIDSTEKWMFWCQNLKSPDTGMPIKKVRIVKGGIEEYKNLSKDGDVFGGQYRKGDQHKGYFVYLDTKNKPRVAPVYAHASVSLEREKLCKLGFTVVDFFQSGCSVEIKVHAISGKNHVSPGVYMLTSIWTQGTIALFKNGEKYLVSLSSISDIASNLKRC

SEQ ID NO: 9 - protein, 1104 aa, unidentified
  REGION 1..1104: note = Synthetic sequence or unknown origin
METKQTTKLRYSLGLDIGSESVGWAVIELNEHGQPIGLVDMGVRAFDAVRQEQQKATTPAQERRVARSQRRRLRNKKKRKKRLIEACINYGLLSNKQEADACLVTLPGDKSPWDLRVEGLDRKLDRREWFRVLYHLVNHRGFKSFKRGEDLEKGRKDDVKKMKAAAKQLSSEWRDRGYRTVAEFLCNDSDWISKHGLRKRNKEGSYEFTILRDDLVEEAKLLFEQQRRFGNEFASAVFETEYIDILDEKPRLLEGEDLKAKVGYCTFEPDERRAPKATFTAQKFRALQIINNLRFINPETGEIKESLTSDEIKRLFNLALNRKEVKAEQILRELGLRGWLIEGYDKNNEKIIVLEDFHKLKEALEKKFPETWGKLLTDIDLYDQVASILTYYLAPESTKRELQKLQLDDEVIDALLNVSFKGHASLSLKALRKIIPYLEQGYKYSKACELAGYDHRALPEKHRRNHIPPFESEEFDKQLKAEYFGITNPNVKRALAQARKVVNAIVRHYGIPSRIGIELAREMTLSRKRREETRLNNERRKERENIIKKLKEEHNVDNPSAKLVDKYILYELQGGKCAYSLKQIDLNRMIHDPSYVEIDHIIPRSISFNNSFSNRVLVLASENRNKGDRLAAEYVKSYYGEEHYNKCLALFEEALKKPHDHRHRKRELALKLKLFKKESLTDEELVEFRERYLINTRHAARFFKKVLCAYLDIEDPRVITINGTITRDLRHLLGVEDLKEGRFSDKHHAVDATICAICDFSTVYKLSNYYKYKDGFYKIDGDTLISQNGLRLKLEDLAWPSFREDIVKRLETLVVSRAPNRKVTGRGHRDTIYSLKHVKKVVDLPEKGKISISSDAPRPTTRVRLDSLKPEQIKAILDNPEKVLVDYQSNYLLYERIIKRLRETEPDDGNKERWAVLAFGPDTEPIRVPSKDGKEGPVVRKIKIFTDILSGVAVRGGIAPYDNIVRLDFYRRKEKNGRYKYYVVPVYAADIAMGIVPDKVATTGKPESEWKKLDDSFEFLFHIFKGDCLRIYKDLKEPPTDMYFTSFDRNTVRLKGNYLDRSNKNKQGKIVTVEESITNAARIQKLHVDILGRLSVVEKEKKVF

SEQ ID NO: 10 - protein, 1372 aa, unidentified
  REGION 1..1372: note = Synthetic sequence or unknown origin
MGIKGEYYLGLDIGTNSVGWAVTNENYQLLRAKGKDLWGVRLFDEAHTAEERRGFRIARRRRQRETARLGMLRELFSEEIDKIDPGFFARLDESRFQMQERAEENKQTYAIFADKEYTDQDYYRDYPTIFHLRRELLKSKEPHDIRLVYLALANMFKHRGHFLNTSLRAEEDKYSFRDACQFLSDQAEEAGINFPLIEQPGELENLLGERGLSRKNMLERASELTGISKKDKEAYHILKLMCGLEAKLTDIFGKEMIEEEHKKLGIAFRAADYEEKAEEIRIIIGDEKFEMILAVKDIHDKGLLSNIMKGHRYLSEARVELYEEHQRDLKKLKTVLKKYNPEAYHDMFRVMKDGNYSAYVGSVNSSDTVIRRTGKGRTQEALYKTIRSALKELPQDDLDVVNILSRIEAEVFLPKQLTASNGIIPNQVHEKEMRAILKQAETYLPFLMEKDDSDLTVSERICRIFSFHLPYYVGTIGPENRDRIEYHGWAERKAPGRIYPWNLEEKIDMKGTAKNFIERMVRHCTYLTGERALPRQSLLYEEFEVLNELNNLKLNGEKLSVEVKQAIYKHLFETGKRVSMKQLENYLIVNGYIKKGETDAISGIDGDFHSSLSSLGKFKGILGEAVHYDENRKMMEDIIFWGTIYGKDKSFLKESICENYGECLSEKDIKRILGFKFEGWGKLSGSFLNMEGVSTEDGVIRKLITALWETNDNLMQLLSARYTYSETLADKMETVEKPLAEWTIEDLDGMYLSAPVKRMVWQTMKIFKELEMVTGGTPKKIFVEMAREEGKKGVRKESRKKKLIELYQAIESEKALWMQEIEDRPEQVFRSKKLYLYYRQMGQCMYTGEAINFDDLMNDNLYDIDHIYPRHFVKDDSIENNLVLVKKENNAHKSDIYPIEEKVQREMYSRWRFLADKGFISREKFNRLTRRTHFTEEEKATFISRQLVETRQGTKAVTQILKQAFPAAEVVFSKAGNVSDFRNKYKLYKVRCVNDLHHANDAYLNIVVGNVYHVKFTKDPLRFIREAQRYPNMDIYKYNMDKIFSWNVERNGEIAWTASKREGEDAGTILTVRKVLSKSSPLVTRMCSENHGGITRKATIWSAETAKGEGYIPVKQSDPRLQDVTRYGGLTAVAGAGYTLVEYKLKGKKVRSLEQLPVYLGRVDSLTEEAMTTYFYKAICEENKGSDISDVCIRKKFIPYNALLKYNGFFYYLAGKTGSSIIMRSAVQAVFSSGEMNYIKKIEKAAATKYYEEKDQRGGLILSKDKNQELYGRIKSKYQNTIFQNKMGKMGSLIINGEEQFGQLMLSDQCAVLMEIMKNFNTGDGVDMKLIGGKEKTGITTINKVISKSEECILIHQSAAGLFEAEIDLLKV

SEQ ID NO: 11 - protein, 1490 aa, unidentified
  REGION 1..1490: note = Synthetic sequence or unknown origin
MKNILGLDLGTNSIGWALVQTDDEGNYTSQIKIGSRIIPMTQDVLGKFDSGVTESAARERTEYRGVRRLRERCLQRRERLLRVLHVLDFLPEHYSSHIGWDSTSNATYGKFLDESEPKIAWKRNKEGKMEFIFMDSFQEMLNDFSIHQPALVADGKKIPLDWTLYYLRKKALSKPIRKEELAWILLSFNQKRGYYQLRGEEEEEKKENRLEEYFKLKVIRVEATDEKRGDNVWYNVHLENGWIYRRASRLPLNDWEGKVREFIVTTDLEKDGTPKMNKDGEVKRSFRSPKDDDWGLQKIRTERDIDASNKTVGEYIYDSILSHPSQKVRGRLVRTIERKFYKDELRAIISKQAEFISELSDSVMLEKCINELYPKNEGHQSSLFRHDMSYFLIDDLLFYQRPLKSKKSLISDCPMENYEYVDRNTGEIKIQAIKCAAKSNPFFQEFRIWQFIQNLRLIDRSGFQETDITSKYISTEDDYVRLFHWLNDQEKVTQNKLLGDYFKIKKPKGKDASYPLRWNYVEDKDYPCNETRYDMLQAIEKAGLCPALISKREDEYRLWHLLYSVNDKNELQKALESYANSGGRNLPESFVREFLKIKPFEKEYASFSEKAIKRLLSLMRYGSMWNEEAIDDKTKERIRNILAGHLEPSISERISHAGFHFEKIEDFRGLPLWIASYIVYGRHAESRDTDKWNTPHEMMSYIRSFRQHSLRNPVVEQCILETLRAVHDLWKEVDHIDEIHVEMGRSMKSTVDQRRRMTEQVIRNENTNLRIRQLLQELKNDDNIKDVRPYSPMQQDILRIYEEGALSTLKKDDEDYAEITRISRLASPTQSEMLRYKLWLEQKYCSPYTGRPISLAKLFTTAYQIEHVIPKARFFDDSFSNKVICEAEVNQLKSNLLGYEFIKKNGGQIVHCPTLGDVSILKEDEYKAFIADNYSSNPNKKRKLLMDDIPEEFIQRQMNDTRYISRFILALLSNVVRDEDEKEYTSKHVIPCTGGITDRLKKDWGLNDVWNHIVAPRFQRMNDLTHSDLFGHWEDKNGKRVFQTDMPLELRRGFSKKRIDHRHHAMDALAIACASRQIISYLNNENAQDTERRYDLRAKLCGKNQLLLKPWDTFTQDAEAALQNIVVSFKNYVRVINKASNYYRHYDESGRKVMVAQTANDQWAVRKPLHKETVFGHVNLKRKKEVPLAKALENPDVIADKNLRKAIQGMLAAGMTTKKVLQHFKDILFSFEGKNIQKVEVFYFTDDTEVMVATRKPLDETFDEKRIKDITDTGIQKILFNYLQSKGGDPKVAFSPEGIQQMNEQIALYNKGKNHQPILRVRVSEPRGEKFQVGQTGNKTRKYVEAQKGTNLYFAIYLDTEGNRSYSTIPLNIVVERLKQGLSPVPETDEKGNRLLFYLSPNDLVYVPTEEERENPDISIDKNRIYKMVSATGNECLFIKSSVASPIVNKQEFGPLNKVGRSIENDCPMIKNVCWKIVVDRLGNIIKVIR

SEQ ID NO: 12 - protein, 1054 aa, unidentified
  REGION 1..1054: note = Synthetic sequence or unknown origin
MSRKYGIGLDIGIGSVGFAVISRTNKEDARIEDLGVRLFDSGETNDHKARKSQERRAHRSVRRLIRRRAHRKERVKNFLQKINLISNDKLKAWQEQNGNQNIFAVRLKGLDAKLTPEEIADCIIHICNHRGYREFYEEESTDKEAGVIKQALAEFEQRFQDGNYRSVADMILHDEVFKTETAFPDYHNHKESERHILIKRAYLEKELLEILKHQQNYYPQLTEHNIDFLCNKIVFAQRDFETGPGEPGKMLNRKTGQKEEQLRKFLGFLDSIGKCMFYKDEKRAFRSTVLSDVYALINCLSQFTYVDVETGEIVLPKEAASVILKEVLIKASATEKELKALLKRFGIEMIKPGKLEVKAPDTIKTLKILKATLEASGYNYEELIAEEQFDLENPSKLQRLCVILSENITPKRRERALEREGWNKKLREEMKRKKFGGTASVCERYMVEAINAFLNGETYGNFQARRLQEREEATEIKTKYKTLPALTKNTDEEIIENVVVFKAINETRKVLNAIIRKYGSPEYINVEVADELGRSFKERDKISKMNRDNEKERKQIVDKIVQLGLRNEGEVKNKDILRFRLWKAQNGVDLYTGRPIEENEVLSEIYEVDHIVPFSLILDDTINNKALVSRTANQEKRQRVPREYLADDEEFMKRVNTLFNKGKISAKKYKYLTLESLYTPQARLLLEEWKSRNINDTRYITRYIVNYLAGNLLFDSDKAKNVYAIKGAITSKMRKLWLNSKSWGNAEKDRENNLHHAADAVVIANLTPAYVEIASDTLKLQSIYKAHHKQESFEYTTYLNGAVRKMEKYYGFNEAYSRRLLEAKGRIPSLVRNLYAEVDKRLVDNSLEFFQDVTCEQFVANVKDYYRDDQIFAESLSMPLVSYKQNKKFQGQITDDNPVKQSQRKDTSIAKLDTLGNENVLSANKYYCIEIYRDKQNKTALRGIRYVDLVKKNKKLYLATPLPENYKEHVMYLFANDYVRIFDGNNKLKFEGYYRSTKNVNRNLLYIRNNNVNSDVIVSVTKNDKVIKLNVDILGKLGGEVKCSVPFMLLSEKD

SEQ ID NO: 13 - protein, 1054 aa, unidentified
  REGION 1..1054: note = Synthetic sequence or unknown origin
MTNYTLGLDIGITSVGYGLIDTDTKSVIDAGVRLFPEANVENNEGRRSQRGARRLKRRRIHRLERVKRLLSNYHLMEESNPPHSTNPYQIRVKGLREELSKAELAVALLHIAKRRGIDNMSVDAEDDAPSDGVSTKDVLAKNANELSHKYVCELQLDRLLAEGKVRGEQNRFQTKDLIEEVKQLLTTQKNYHTFDDEFINHYIKLVQQRRAYYEGPGEPSPYGWGGNLKEWYEMLMGHCTYFPDELRSVKYAYSADLFNALNDLNNLVIQRDGVPYLEYFEKFHIIENVFKQKKTPTLKQIAKEIDVTPEDIKGYRVTKSGKSEFTKFKIYHDLKDILTHKEYLEDNDLMDEIAKILTIYQDSESIKEELEKLTELFTEEEKEAISQLSSYTGTHRLSLKCINYVLPDLWKTPYNQMELFTQLNLKPKKVELKNQNHIPTEIVDEFILSPVVRRSFIQSIKVVDAVIQKYGQPTDIIIELARENNSKEQRQFINKLQKQHDQTRHRIEEIMKQYNNENAKYLFEKIKLHDMQEGKCLYSLKDIPLEDLLRNPYHYEVDHIIPRSVAFDNSLNNKVLVRQEENSKKGARTPYQYLNSSDAVISYNQFKQHVLNLSKSKDRMSKKKRDYLLEERDINKFEVQKEFINRNLVDTRYTTRELANFLKTYFKINNIDTKVKTINGGFTNYLRKVWRFSKERNHGYKHHAEDALVIANANFLFKQHKALKEAEKVLNNPASKDESAIDVFNDNQYKELMAKNSVVDEIKDFKDFKFSHRVDKKPNRQLLNDTLYSTRNIDNHDYIVQKLTNIYDKDNKEVKKIVSEKPEKLLMYQHDPKTFKKLQTVMDQYAEEKNPLAKYYEEHGEYLKKYAKKGNGPAIKSLKYIGKKVNAHFDVTDKYPNPKNKLVKLSLKSFRFDIYKGESGYKMLGLSYLDVEKKDAYYRIPSEYYEELKKKKKINEGDEFIGSFYTNDLIKVNGEKYRVIGVNNSDRNIIEVDMPDIRYREYLELNNKKGTPRIFITIGKKINTIEKYSTDILGNLYKNERPKKPQLIFKKGVE

SEQ ID NO: 14 - protein, 1063 aa, unidentified
  REGION 1..1063: note = Synthetic sequence or unknown origin
MASGEKSQLGIHLDVGHDSIGWCVTRTMPGDEKFLAIPGTGVVLFPADDCLANQRRAFRRQRRHIRATRQRIERMKSVLLDMGVMTEGELKRNLTAAPWKLAAQVLTTGKTLSWPELWAVLRWYAHNRGYDGNVLASLRSGRMVSAEDIEKNAAARELMAKYGTASMAETMCHYMKIEPDGKIIASRERFKGLGVSFDRSCVEKEVRQILLVHKGVLKGVDDAFVHLLMASPVTEPHYLRTVEKLPFHVPNRYWGGVLFGQLAPRFDNRLIGACPVTGEKLPGKATSEFLRFRFAMMLAHVRVGSDSRPLTADERGRIYKAATMCGGFQKGSFKKIVDEVTGEDVTNIDALLTAPEADKSLVLYPGLFSLTKKGLDAFIESQALRTLANKLFRGKRMTVGDVIAQIPADKQEDAKAALAKNTRKGKKAFDPLSDAIVAELPSGRAPYARSVLVKAAEAVLRGEDPTEKGGILYRDATKEDVLKEEDIDRETNNHLVRHRVKILLRLLRDIVHDYAENNPAQVAQVTIEMARDLKELSGMTNKQIVSEMYLKTAHHRNAAKKLAELLHCDAAAVSAGLVRKMRIAEDLDFKCPYTGWKFDPMDVVHKNVDLDHILPRSQRATDSLDSMVLTFTEVNRMKGARTGLEFVREFGGQRVNGRDNLEVFDEKRYRDFVDKLRIDRYPDDKKRQKRRQEKLLKLHSEDVGMTEGMLTRTSYITTLATKAIRGFFANCGRMPRIISVPGRVTAELRKQWDILGLLAESDPRVVDENGRLRLKQEIRGITHMHHAVDAITLGLAATLLPTDGTFWAMMCKRRVKEEEKRLLASTGAFQFTAQNEPRLIELPPYLRQAISGALAEQRVVVHQPQERAGLKVQQNTWGIEKIENGMVYIRQRSRDEKTGKIAVKHDSVTIDKAFGIKPTNGNGKLQAIKGVLLPDVNFGVALLKDPKFVRHQRVWNELAIVKDENEGRLPCLVRRGGLIRVATGNFSGVWRVASVKDNTSGIALDIVRPNAVKVQNGVDYAKINVKLSSLVKAGLDVVKQTYTGVALCPITSLTSRQTGSRSQ

SEQ ID NO: 15 - protein, 1065 aa, unidentified
  REGION 1..1065: note = Synthetic sequence or unknown origin
MEKRIFGFDIGIASLGWAVVDFDDTADPENNIYPTGKIVKSGVRCFPVAENPKDGKSLAFPRRQKRLQRKLCRRKARRMAGIKALFVANGLIDRASLFDEKENIYKARDKADVWDLRVKALTEKLTTVEFIRVLTHLAKHRGFKSYRIVQEKADKENGKVLAAVKANRALLENSKTLAQIIVEKGGPKRNRDDREGNSTYENSIPRDEIEREAKLIFEKQRELGLTAATEKLQRDFVGIAFRFREINGKKIEKMIGKCLFEKDEPRAPKNAPSAEFFVAWTKINNCHVRDNDGKLRFLTQEEKDAVFELLKNKKEVKYADIHKKLFPNRPDIRFADVEYNPKPVFDKKTGEIKEPSEPESLKFFALKGWHDLKSAIDVSAYPNEWLDKAVTVIATQKNDANISKELKNLGFSASDAENLAGLSFSKFISLSLKALYKILPEMQAGKKYNEACEAVGYDFKSTGESFAVQKGKFLPPIPESLATTVPVVNRAMAQFRKVYNALVREYGTPDQINVELARDVYNNHDERREIAAKQNEYAEEKKKVKASACSKLELADISGRDLLKFRLYEQQDGKCIYSGEKLDLRRLVEQDYCDVDHIIPYSRSLDNSQNNKVLCLSRENRQKSDKTPLEYITDPVKQAEFIARVKSMKGLGSKKRDRLLIRDFNEKDVDFRERNINDTRYMARYIMKYLDDCIDFSQSKTDVKDRVQARNGALTDFLRHQWGLKKDRSESDKHHAQDAIVIACATNGYTQYLAHLSKIFENKQAYANKYGEPWYKAFKQHVKQPWDGFYQDVQASLAEIFVSRPPRKNATGEIHQDTVHTLNPKKKNRWGELVYSAKDVKSGLNVRGGMAGNSNMFRCDVFEKGGRFFIVPVYLADFCEKNRSDCFCPKDKEHEKPDETYKFLFSVFKDDYLSIETNKGEKFYGYMNQYITSTGQFYIGSNDSSPMYSISTSSFEKQDILLYRIGEKFEKCSVVDFDSEKQEMKVASLEDGSIHKIKASAKVNKKGETQKIYKTDKPYEKLDKGKTISSATFKRIRKYQVDPLGRYVEVKSEIRLPLNIKKGKS

SEQ ID NO: 16 - protein, 1072 aa, unidentified
  REGION 1..1072: note = Synthetic sequence or unknown origin
MYRLGLDIGTTSVGWAVLNTNNDAEPNRIIDLGVRIFDAAENPKDGSSLAAPRRDARGARRRNRRHRHRMERIKALLVNSSVLTKEELKDLYNKKELIDIYQVRYEALDRALTNEEFARLLIHIAQRRGFKSNRKNEDKKSDSGKLVTATTENTEYMASKGYRTVGEMLYLDEKFAHNKRNKGGDYSNTFLRSQLTEEVVIIFNQQKLFGNRFADDVLLTKYTEILLSQRDFDQGPNEPSPYAGNQIEKMVGECTFEKGEKRASKATYSFEYFNLLQKINAIRIQSPEGKRTLTADERNRIVELCHKTEKVEYRHLRNAIPLESYEQFANLSYGDKTTEEVEKTKFQYLNAYHDMRKVFDKLSKGHISNISVKQRDAIATALTYYKTDEKIISALADIELSQEELNVVLELKNYSKFGNLSVKALNKIIPYLEQGYTYDKACGLVGYDFRGHTDSYKSKYLPKLPDDIYDITSPVVKRAVNQTIKVVNEIIRRYGSPAAVNIELAREMSRSFNDRKEIEKAQKENADNNQKIREEIKDTFKILSPTGQDIIKYRLWKEQQETCLYTNSPIKAELLFSPGYCEIDHIIPYSISFDDSYSNKVLVMAYANREKGNRLPLQYVKSKDDFIGLVNAFIKNKAKKQKLLKEYISVEDENQIKQRSLQDTQFITRFMLNYIRDNLEFDSAYSGKVKVQAVNGAVTAYMRKRWGISKFREDTDKHHCIDAVVVACITPGIIQKVTRYSKRKENYYNDRDIELNNERFPLPWHEFKDEIDARTIANPAALLAEINLPNYMGVDIEKIRPIFVSRMTKKKTSGQAHKETIRAWRDVTIDGRTEKKTVTKTALQNLKLDKNNEIVNYYNPSSDRLLYELLRDKLIAAGGNGKKAFPDGYILKPAPKGGVQSKVQKVKIYDTSSLNVSVNDGVAANGDMVRIDLYKVEGDGYYFVPIYVADLIKEKLPNKASVAAKSYAEWKEMKDEDFLWSVYPNDLLYIEHKKEMKFTKVFKDARINNEMFANKVFVYYNSADISTGSIKIITDDNGYMIRGLGIKTISNIQKYHVDVLGNKYKAEKESRK

SEQ ID NO: 17 - protein, 1073 aa, unidentified
  REGION 1..1073: note = Synthetic sequence or unknown origin
MRYTIGLDIGIASVGWAVINNDENRIENLGVRIFKKAEDPKTGKSPNFDRRLARGSRRRLRRRAIRMQKIKDLFLKYGLVNSEELKNLYTINESTIDVWELREIALDNKIDRKSWARILTHIAKRRGYKSNRKIDIEDKEVGKLSKGTIENKKLLEENNYRTIGEMFYKDEKFKTNKRNKSGEYTNTVLRSMLVDEVKILFAKQREYGSQYAKEEFEKEYIDEMCFQEKYLTEELLEKMLGKCTFEEGEVRAPKNSYTFERFMLLQKVNNLRIDMLGEEIKLTEEQRMKIIEMAYKQSEVKYIQIRKLMQLPEKAKFSDLNYYIRNNKTDQKNEELSESDFNKKIEDKKFVKLDGWHSIRTALNKIDKAEKFKLLEANHDLQNIIADALVRNKTDEDIQKYLIDRNIDLDLINAAKQISFSKFGHLSYKAMKNIIPELEKGLTYDKACEEAGYDYKGEEKTKQYKLPALSELDEVILNPVVLRAVTQTRKIINAIIDKYGSPMIINIETAKELSKSFDERNKIRKEQEENNSKNEEIKKNIKNEFNIDAKPQDIVKVKLWREQQGLCAYSQRRIEFDKLFDDNYVQIDHAIPFSKCFDDSYNNKVLVLTDENQNKRERTPYEYFGEDIEHWHKFEEFVNLMYKNNSKKKQKLLIKNFSEDKSREWISRNINDTRYIAKFMQNYIRENLLFAESENKKKVFNINGSATAVLRRFWGLSKNREESDKHHAQDAVVIACATPGNIQRVSNYSRRKILHKDSIIDKETGEIIDLTIKEPWPNFRKEVEARMEDADNNGELYLLKHGIFYNYNDIDINTIKPIFISRMPEHKVTGAAHKDSVKSLKYKEKNFTTIKKPIISVSSAEIRTIVEDERCRDLYISDRIMYDYFYQRLVIEKQKASVVFKEGYRKNSNNGIGPIVRSIKVPSLGISGVELKNKGIADNDNMVRIDIFEKDLKFYMVPIYVSDFTKQELPNKAVVAYKDESEWKEMDSTYSFKFSLYPNDLVKIKKKGKKEEFLYYNSANRRIASITLITPNEGHKVENIGIQGLEIFEKYNVDILGNISKIKNEKREGVKKL

SEQ ID NO: 18 - protein, 1075 aa, unidentified
  REGION 1..1075: note = Synthetic sequence or unknown origin
MTQKKEVKKMSKTDSISSYTLGIDLGSNSIGWAIVKLDENDNPCGIEKVGVRVFEAGMKGQYEEGKEESRNKKRREARLVRRQIERRARRYRKLANLLQQIKLLPQGDLNDSGERQRILDELDKVLRTKYINNHLSPEEKNRLHQIFIYYLRSLSVEQKLEPNALGRVLYHLGQRRGFLSNRRGQKKDNEEQGKVKKGIAEIRVEMSRLGTETLGKYFAQIDTMDINQKRIRGRWVARDMYEQEFYTIWDFQSQFYPELLTEEKKKQVFFAIFFQRPLKSQKDKIGFCQFECIARGKKRNRRRAPWVILKAQRFRLLQKVNDLLIVADKNTKNPLTDDERKLVIEHLEKNGDTTFTQLRSLLRLPEEVKFNLEVAGEEKIPGNRTASEIRKVIGEHWDGMNSEEKDKLVEDIYSIVSDRALKKRLMRHWKFTEEEAQKLSEIPIEDGYCNLSRQAIDKFLPGLQQGRRYGELVKEIYGMDAIREGFKVDLLPPIEEAPIGEIRNPTVQKTLSEMRKIVNEIVKLYGKPRYIRIETGKDLRNTKKERERLWKNSRDMEKERKKIKDNLMKNGIANPTRDDIERYMLAKECRWICPYTGRSIKFKSLFEESQYDIEHIIPLSRCLDDSFKNKTLCYHEENRNRKHNKTPYETYSQDETRWNEILERVSKFNSAHAKEKLKRFNLHGKTLEEFIDKFSSSQLNDTRYAAREAVIFCGLLYGSEYRKHVFAVAGPTTAVIRRMWKLNKLLGSPEKNREDHRQHAIDAIVIAITSPAMIKNISEQAEKIPKSERKHDRWWRFIQPPWDTLYNEAKEKILSIIVSHKPERKVSGRLHEETNYSPPKQGDNKDETVVHVRKAIASLSKGEVEEIVDPVVRETVKKKLEELGKENPKKAFTDLKNYPLMPNRKGLQIPIKSVRIRKKLSVFPVGSKHRVRYVATDENHHIEIFETKDKKGRIIWDANVVSMFEAMQRKRRGEEIIQRKLIRDGKVVEDAKFLFSLCKGDMVYMKDSEGEYQYYKLVIVSEYASGAKVMFFLPHHVAKIPKSWVGLTKTSSALQKSEAKKCSINVLGETHIAHD

SEQ ID NO: 19 - protein, 1076 aa, unidentified
  REGION 1..1076: note = Synthetic sequence or unknown origin
MNMSYGIGLDIGVASVGWAVVELDENAEPFGLIRANARIFQGAEHPKTGNSLAAPRREARSIRRVVRRRALRKHDFYALLEKEGIAKKEEMDKMFSAGNLEDIYKLRARALDETVSKKEFARILLHLMQRRGFKSNRKADKNSEDGKLLSAISENEKRMKENGYRTVGEMLFKDEIFGKHKRNRTNDYVATVSRDEIKHEAETVFEMQRQFGQDWASKTFETKYLAILLRQRSYDQGPGGDSPYKGGWKDEIGKCALIPGEDRAFKNTYTFERSTLLQKINHLRVWENGYTRGLTDQERKSLIDLAYRIETVSYSRIRKELGWADDIKFSDIQYDYRDKEKNKKEEDKRKLPVMRGYHSLRKVLNISNTDANFDKHLLDDIVTVLALHKDTEARKKELEKLPLTKEQIDKLLELDFSKTGNLSIKACERIEPYLLEGLTYDKACEKAGFDFHGHTAGGKGSTLPANAEELKNINNPVVRRSISQTIKVVNAIIRDMGCSPMWIHIEVARELKHSFDERKKATAAMQENQKENEKLMKEIKETFGILNPKGLDLVKYRLWKEQQERCMYSGKPIERSRLFEPGYAEVDHIVPFSISFDDSRNNKVLVLTSENQNKGNRLPLEYMTGEQRKAFIVRVKAQVKNGKKKQNLLREKVTDYERDNFRERNLKDTQYIAKFLFNFIQDHLIFAQLPKGKKQHVVAVAGGITATLRSRWGLVKLRENGDVHHAVDAIVIACTTQKMIKDISDYYARKEACHNAPLRFPEPWPNFRKDIDQRLTQSSFSKEDLMKCNPVFYSQVDISRIQPVFVSRMPQHKVTGAAHKETIKSPKALEDGLLVTKQPLTALKLDKKTGEIELYYQPSSDKLLYEALRARLQAFDGDGKKAFAGPEPFHKPKADGTPGPIVRKVKLYEKASLSVPIHGGRGAANNDSMVRTDVFFVPGEGYYLVPVYVSDTIKKKLPDRAVVAHKSYSEWKVMKEEDFLFSLYANDLIEVEHKKAIVFTVSHKGSTLAPKWETKRTLCYYEGMNISTGAITISTPDNAYTLPGLGVKTLATLKKFEVDVLGNVREVSKETRQQFR

SEQ ID NO: 20 - protein, 1078 aa, unidentified
  REGION 1..1078: note = Synthetic sequence or unknown origin
MQWPYGVGLDIGVASIGWATVALDEKAQPCGLIRLGSRVFKRAEQPKTGESLAAPRREARGMRRRLRRRALRKQDFYQLLEKNHLPDKEELSRLFAAGGLEDIYALRTRALDEAVTPQEFARILLHLMQRRGFKSNRLAGKSKKDGVLLQAVTQNQLRMQENGYRTVGEMLYKDPLFAACKRNKGENYLSTVSREEIANEAQLLFEAQREKGRDWATPELEAEYLSILLRQRSFDQGPGGNSPYKGGWAERVGPCTLLPEEKRAFKNTYSFERFTLLQKINNIRIVESGQTQALSDEERQKVMDLAYRVETVPYTLIRKELQWPQTIRFADVRYDVDAAPEAAEKKCKLPPMKGYHALRKALGTRQAELPLWDDVITILASHRDEGVRKKLLEEKGLTAEQVEAVLGLEFSGVGHISLKACQMLEPWLLQGLKYDQACSKAGLDFRGHSNIKKTPKLPASAPELKDITSPVVRRAVSQTIKLVNAIIREMEQPPVWIHIELARELSRTFEERRRDQKSMEDNARQNECLMQEIRDTFHKLNPTGQDLIKYRLWKEQDGICAYSQQSIAVERLFETGYAEVDHIVPYSISFDDSRSNKVLVMAAENHQKGNRLPLQYLQGERREKFIVWTKSQVRNYRKQKNLLRETVSEEEQNGFKQRNLQDTQYMARFLLNYIRDHLAFADHPAAGKQRVMALAGAVTSHLRKRWGLTKVRADGDLHHALDAAVIACATKGMVQQISGYYHRIEGEYQQSSDGTYSVHTRTGEVFPAPWPHFRDELIQRLSQKPQENLMQWNPVFYSNFDVESIRPVFVSRMPQHKVTGAAHKETIKSPKALQDGLLIVKHPLTDLKLNKKTGEIEGYYQPSSDKLLYEALRARLLEFGGDGKKAFTEPFYKPKSDGTPGPLVRKVKLCEKASLCVPVHGGNGAADNDSMVRVDVFFVPGDGYYMVPIYVSDTKKKELPNRAVVAHKEFSAWKVMEEKNFLFSLYADDLIEVARKKVMPFTIVNSGSTLPPSYETTHEMVYYGGLDISSGNIKVTIHDNSYSLRGLGIKTLNTLQKYEVDILGNVREVKKEKRQSFR

SEQ ID NO: 21 - protein, 1080 aa, unidentified
  REGION 1..1080: note = Synthetic sequence or unknown origin
MKYGVGLDCGIASVGYCVTELDFNDEPRRIIRLGSRIFDKAENPKDGSSLAQPRREKRGLRRRIRRHQHRLERIRYMLVQENIVSQAELDTMFKGKLSNIYEIRTRALDEPVSNIEFARVLINLAQRRGFKSNRKVDEETSDKETGKLLGAIENNKENIIQNGYRTVGEMLFKDERYSKYKRNKGEDYLNTVSRDMIADEIKAIFASQRSFGMPFANENTEHEYTDIVMSQRPFDLGPGEGNEKSPSPYAGNQIEKMVGRCTFFPKEKRAAKATYSFQLFSLLQGINNITLVDGNSNKYPLSAQERRILKEYCFNTANVTYASIRKKLGISTDYRFNNISYGENGIEESEKKTKFQHLKNYHQMKKILGDSINAFSHDELDEIGRIFTYYKNDSKIIENLKEAGIDESMYPSLLKLPSFSKMGHISVKACKMLIPFLDEGKTYNEACESAGIDFKAHSMATKQMYLPPKSDELEDIVNPVVKRAVSQTIKVINSIIREMGNSPTYINIELARDLSKSKKERDLIDKKYQTNRAANEQIKKEIADNFGFEAKGQDIIKLKLWHEQDGICPYTLKPIEYGKLFNDKGYVDIDHIVPYSACFDDSYNNKILTFSRENRQKSNRLPLEYLDESQKSKYRVWVNNNIKNYRKKQNLLKECLTENDKKEFKSRNLNDTRYLSKVLYNYINDNLLFDEFYDDRKRHVVSVNGAVTAYMRKRWGIDKVRENGDLHHAVDAAVISCVTQGMINQISKYSFDKETEFDVDTRTGEVLEQFPFPYREFRKELEARSEIEDEKRLKNVLLSLPNYSYDDVEVAKPAFVSRMPRHKVTGEAHEATIRSGKVEGYTISKIPLTKLKLKNGGIDKYYKPESDTLLYNALLQRLEEFNGNAEKAFAEEFHKPKSDGTPGPVVKKVKIIEKSSSNVKARNENKLGVADNGSMVRIDVFYVDGEGYYFVPIYVSDTVKPTLPNRACSRGKSGWKEMDDKDFVFSLYSNDLIRITAKKDMKFSLVNKDSTLPSNKFSNGELVYYITADISTASITVETHDGAYAFKGCGIKTLTNIEKYTVDPLGNASKVKKEKRMYFK

SEQ ID NO: 22 - protein, 1081 aa, unidentified
  REGION 1..1081: note = Synthetic sequence or unknown origin
MKWPYGIGLDIGVASVGWAVVALNDAAQPCGFIRLGSRIFKRAEQPDTGESLAAPRRMARSMRRRIRRKALRKQDLYRLMEQCDLATQEELSALFAAGHLEDIYALRTRALDESVTSQEFARILLHLMQRRGFKSNRRTANSSKDDGLLLQAVTQNQQRMAENGYRTVGEMLYKDSLFCSHKRNKGEAYLSTVSRDEIAREAQTLFAVQRGFGQPWATPELEAEYLSILLRQRSFDEGPGGNSPYRGGWADKIGSCTLLPDKHRAFKNTPTFERFNLLQKINHIRVVESGLTRPLSEEERAQLLALAYRIETVPYNRIRKELHWDEGVRFADVRYETGAKPETYEKKYKLPILKGTHALRKALKADTPDFPLWDELVTFLALHRDEDARRTMLAEKGLTPAQTEALLDLDFAGTGHISLEACRMLEPWLLQGLTYDQACTQAGLDFRAHNNTEKDVKLPASAQELEDITSPVVRRAVSQTIKVVNAIIREMGQPPVWLHLELARELSRTLDERRKAEKSMEQNAFENEHLMQEIRETFHMLEPTGQDLVKYRLWKEQDHRCAYSLQYIAPEHLFESGYAEVDHIVPYSISFDDSRSNKVLVLSAENRQKGNRLPLQYLQGERREKFIVWTKTQVRNYRKQKNLLRESLSEEEQNGFKQRNLQDTQYMARFLLNYIRDHLAFADHPAAGKQRVMALSGGVTSHLRKRWGLTKVRTDGDLHHALDAAVIACATQGMVRQVSGYYHRMEGAYLQQADGNGSTHSRTGERFPAPWPHFRDELVQRLSPNPQDNLMQCNPMFYSQFDVDSIQPVFVSRMPQHKVTGAAHKETIKSPKALNDGLLVVKQPLTALKLDKKTGEIAGYYQPSSDRLLYEALRARLQAYGGDGKKAFSGPEPFRKPKADGTPGPIVRKVKLCEKTSLSVLVHGGQGVADNDSMVRVDVFFVPGDGYYLVPIYISDTRKKELPNRAVVAHKNYSNWKVMDDRDFLFSLYADDLIEIEHKKGLTFTVANKDSTLPAQWETKRTLCYYTGMNISSGSVTIVSPDGAYILPSLGVKTLVSLKKYEVDALGNVREVRKESRQRFR

SEQ ID NO: 23 - protein, 1081 aa, unidentified
  REGION 1..1081: note = Synthetic sequence or unknown origin
MKIIGLDIGIRSIGWALQEDGEIIAKGIRIPRSVEDAQTKESLAAHRGAARRIRRTLYRRKARLSLLKRLICNEFGLNLADYHAKDGDLPKAFVADENTKSPYELRVKALEHKLNADEFARVILHIAKHRGYGNKHARKESDKDKGAVLSALKNNEKALTAYKSVGEYLYKEFYQKGRFITTKDENGKEVLERDEAHFGKVRNTTDVYEQCMRQEWLQAELELIFEKQRELGFKFSDEFKNKVLEIAFFQRPLKDTDDKVGFCTFFPDEKRAPKDSLSAIEYVALGKIINELKYIEKKWKKETGEELKGKICAPQNINDILKIVIEKGEISYKEFRSILKLDERVKIFSKNVKLDYTQKTIDEAEKAKFLELKATKDNLNIPNLKGFQNALKGSFEKFDRKTLDDIAFDLATINDKEKLFKELDKYDLSAEQKEALSNLSFSKFLNLSYKALNEIIPLMKDGLRYDEAVEKLGFKPSDEYDYDKVQKELHNPVVSHILAEVVKVLKAILKKHGQVHKINIEFTREAGISKEKRNKLENKQKSNFQANEKAKEMCNTLGIVASHKNILKIKLWKEQGGACVYSCNNGKGKTITEKDLQDETTLQIDHIYPYSRSFDDSYSNKVLVFTEQNQIKRERTPFEAFGSNTNKWNNIVSFVNGCKTMSESKKKRILNTEFKEREQGFIQRNLVDTSYIANVVRDYIDKNVKFLPLDEKELAQSTMFFELDSYNEKDDSKKAYKRKHIEIISGNLTSMMKHYWGLHFLDKKNEFGEYEKDRNHHLHHALDAIIISYMNASRVKAFADFKKNLETMKASEYAEKLSEIEKEQKRTKRKKSTFEVPSNYANRDEFERKIKEQIFGIFVSQPPNKKARGALHLDSFYSQSDTSVISSKDTMENALELGKVRKIGTKIVSNASMVRLDIFKRKKDDKFFGVPIYTMDFAKGVLPNKAVGSKEWIEMDSNYEFLFSIFSNDLLYVKKKGMEKAELCYYVKFDIGGGQISFKSHDNRLKSLTENQIKLYGTKDPTEERVRGRVGIQNLEIFEKWQVSPLGEVKKAEFKEREPIALKSTPKNSKLDKLNSKTERK

SEQ ID NO: 24 - protein, 1083 aa, unidentified
  REGION 1..1083: note = Synthetic sequence or unknown origin
MKYVMGLDLGITSVGWAVINLDKKRIEDLGVRIFPGGERPKDGGSLNENRRLFRGQRRRLSRRRVRMRKIKELLVEQGLIVKEELENFYQLKKEDRDVWLLRVESLERKLEDKEWARVLTTLAKRRGYKSNRKDSKSEKEESGRVLKAIQLNQTIMENKNYRTVGEMLVKETNITTETLAKQALRNKADQYDHCVLREMLVEELKTLFEIQRNLGNLKASESFEKEYLEVFEYQKPFMTRELMEKMIGKCTFEKEEPRASKNSWTFERFMLLQKINNLTYSTGSEKHNLSQEEREKIITLAYEQREIKYTTLRKTLKLPDDARFTGLNYFIRKKKQEELTEEKYRQEVEKTTFVKLNGYHTLKEAFKKNEKIGLWKEFEKDKEKLDDVAETLSKSKTEQEIQKELEQIGLTKEEIAIVKDVNFDKYGHLSYKAMKKILPYLEEGKTYDKACELAGYNFKNETENPQKKLPPILQERGINPVMYRTVTQTRKIINAIIEKYGSPYEIHIEVARDLTKNRDERNKIQKKQEENRAENEKTKEYIRETFKIENPKPVDILKVKLWREQGGKSAYSLKAISPEQLFEDNYVQIDHALPFSRSFDDSYNNKVLVLTKENQDKRNLTPREYIKNEEEWEQYEAWIKTTYKYNPRKRENLLMKNFDEERAGDWRARNLVDTKYIARFLANYIKSNLLFEDYGEKSNRIKVKMIPGGVTTALRHYWGIAKKDRETDTHHAEDAVILACATNEFINKVMDFSKYKELYHEYKDGNYIDKETGEIVENKYKTHEMKRPWPEFKEELEARTSQNPRHDLESGQFKNYNDFNFENLKPLFVSRMPNRKITGQAHKETIYSDRKNGVVVIKTRLQELSGEDIKNICTKEEYKELYMSDKNTYDAIYRRMAEYNFKADKAFAPGYTIRKKAKNGEGTIVKSIKVPSKMNSGVKVQGGIAANGGMVRVDVFEKDGKYYLVPVYVADLVKGEIPNLAIMANKPKSEWTFMDESYNFKFSLFLNDLVYVKKGEKEILGYYVSTHSGTGAINLKSPNGQSEYEGIGVKTLDKFEKYEVDLLGNYYKVKKETRKGGKSRLKK

SEQ ID NO: 25 - protein, 1087 aa, unidentified
  REGION 1..1087: note = Synthetic sequence or unknown origin
MHRYAIGLDIGITSVGWAALALDAEENPCGMLDFGSRIFTGAEHPKTGASLAAPRREARGARRRLRRHRHRNERIRRLMVSGGLISQEQLESLFAGQLEDIYALRTRALDEPVTREELARIMLHLSQRRGFRSNRKGGADAEDGKLLEAVGDNKRRMDEKGYRTAGEMFFKDEAFAAHKRNKGGNYIATVTRAMTEDEVHRIFAAQRGFGAEYANEKLEAAYLDILLSQRSFDEGPGGDSPYGGSQIERMIGTCAFEPDQPRAAKAAYSFEYFSLLEKLNHIRLVSGGKSEPLTDAQRKKLIELAHKQDTLSYAKIRKELELNEAVRFNSVRYTDDATFEEQEKKEKIVCMKAYHAMRKAVDKNAKGRFAYLTIPQRNEIGRVLSTYKTSAKIEPALAAAGIEPCDIAALEGLSFTKFGHLSIKACDKLIPFLEKGMNYNDACAAAGYDFRGHSKDGRQMYLPPLGDDCTEITSPVVRRAVSQTIKVINAIIRRYGTSPVYVNIELAREMSKDFAERNKIKKQNDDNRSKNEKIKEQVAEYKHGTATGLDIVKMKLFNEQGGICAYSQRQMSIERLFDPNYAEVDHIVPYSISFDDRYKNKVLVLTEENRNKGNRLPLQYLTGERRDRFIVWVNNSVRDFQKRKLLLKEELTPEEENDWKERNLQDTKFVSSFLLNYINDNLLFAPSVRRKKRVTAVNGAVTDYMRKRWGISKVREDGDRHHAVDAVVIACTTDALIQKVSRYESWHERHYMPTENGSILVDPATGEIKQTFPYPWAMFRKELEARLSNDPSRAVADLKLPFYMDADAPPVKPLFVSRMPTRKVTGAAHKDTVKSARALADGVAIVRRPLTALKLDKDGEIAGYYNKDSDRLLYDALKARLTEYGGNAAKAFAEPFYKPKSDGTPGPVVNKVKLTEPTTLSVPVQDGTGIADNDSMVRIDVFRVVGDGYYFVPVYVADTLKQELPDRAVVANRQYNEWKQMSDDDFVFSLYPNDLVKVRHKRGMKLTKCFEESTLPATMDCKESMFYYISSCISTGAICCITNDNTYAIKSLGIKTLESIEKYTVDILGEYHPVKKEERQRFNTKRG

SEQ ID NO: 26 - protein, 1087 aa, unidentified
  REGION 1..1087: note = Synthetic sequence or unknown origin
MNYVVGLDIGITSCGWAALELNEKDEPIRIVDLNSRIFDKAETPKTGASLAAPRRMARGIRRLTRRRKFRLHRVRGFLVQNHILTKEEIDNLYQEAHKTSIYELRYKALSEKVSPSDWARLLIFFAKHRGFLSNRKNSKSGEDGVMLTAIRENEGILKKYCTVGDMIYRDEKFKEHKRNKGGTYQFTVSRAMLTEEIKTLFQKQRELGQPFAGKEAEDKYLQIFSAQRNFDEGPGGNSPYAGDQIEKMIGDCTFEDGTNGRPLKKRAPKASYAFMAFNLWQKINHIRVDYKGDQRSLTLEEKNKVADLAWSKENITYYDLRNTLHIEEEARFKDVSYSYNSTSEDSEKKVKFSWVKPYHAMRRALEKVEKNYIKKVSHEEIDIIAYAFTVYKNDEKIRSSLKEKGIGDNVADTLLAHLDGFSKFGHLSEYACYKLLPFLEEGNEYYKACEMAGYDFQKSSIKKMKDIPNPVVKRAITQTLKVIKAIQRKYGDPVEVHIELARELARSFKDRKVMDDQMKGNNARNEKIKKTLSEEFGVLSPTGQDIVKWKLCEEQNNVCAYSQKSFDVHRLLHESDYAEVDHILPYSRSFDDSYRNKVLVLTKENREKGNRTPMEYLADKPEQKEKFITWVKTTIKDSKKREHLLRIKYSEEEEKEWKERHLQDTRYITRFLYNYLLQNLKLAAGYTDRKKRIKPINGAVTGYIRKRLGISKIRENGDLHHAVDAVVIAATTERMIQRVAKYSRTREGWRKKPQEREVFPEPWFSFRKELEARVSENPEEVIKNLHLPSYQGVMDIKKPFVSRMPRRKVRGAAHKETVRSGKLLKEGYTIYKTDLSDLKLKNGEIEGYYQPESDRLLYEALKSRIKDTEERIKAEVDNKKERDAKLAKIGQIAFKSPFYKPKADGTKGPLVKKVKIIEKSSLNVPVHKGKSVAYNDVMVRVDVFCVEKKGKNNYYLIPVYVADTVKNELPRRAIVAHKPYEEWKIMDDKDFIFSLYPNDLIHIVSAKKISLSAVKGSTLESKIETNDAYLYYKKTNISTGAISVITHDNSHEMGSLGVRTLLKIEKCVVDPLGNISLVKKEKRQSFR

SEQ ID NO: 27 - protein, 1088 aa, unidentified
  REGION 1..1088: note = Synthetic sequence or unknown origin
MEFAYGIGLDIGIASIGWSVVALDADARPYGLIKLGSRIFEKAEQPKTGESLALPRRTARGMRRRLRRKALRKQDTYTFLEKYQIADRDTMQRLFDAGHLEDVYALRVRALDEAVTKEEFARILLHLMQRRGFQSNRRNAGGEDGELLRAVKENRACMEQNGYRTVGEMLLKNERFAAHKRNKAENYLSTVGRDMVTEEARILFERQRELGCAWASPEAEAEYLSILLRQRTFDEGPAAPSPYAGNQVEKMVGRCTLEPDQPRAPKSCATFERFTLLQKVNHIRLIVQGKTVPLNEEQRQIVMELAYKSADVDHAKIRKALNLAPEVRFNDVRYQGEEKDFAKCEKKEKLPALKGWHAICKTLGKDAAEKLSEETRDEMIRILSLYKNDTARIERLMQLGFDRAAAEALCELNFSGFGHISLKACRKLMPYLEGGMTYDQACTAAGYDFRAHTGNDKGKFLPAVIPEMEDITSPVVRRSVAQTIKVVNAIIREQGHSPVYLNIELARELRKSFEERAEMDRSMQKNAAYNEQLMKEIRETFHIISPNGQDLVKYKLWKEQDGICAYSGEKLHAESLFQAGYAEVDHIIPYSISFDDSYNNKVLVLKRENQQKGNRLPLEYLKGEKRDEFIVRTNRMVRNYRKRQNLLKEKLTEEEQQGFKLRNLQDTQQMARFLLNFIRDYLQFEEHPAAGKQRVTALGGSITAHLRKRWGLSKIREDGDLHHALDATVIACATQGMIQEISNYSKRNEMRFEREYIQDFDGNGSIDRRTKEHFPAPWQHFRDEVDIRLSDAPQEGLLHLNPRFYAEYCVENVKPAFVSRMPHRKVTGAAHKETIKGAKALDQGIVTVKRALTELTLDKKTGEIANYYMPQSDALLYNALKERLQAFGGNAEKAFAEPFYKPKSDGTRGPLVRKVKLCEKANLMVPVNGGSGVANNDSMVRIDVFYVPDDGYYWVPIYVADTLKPTLPNRAVVAYKPYQEWQEMKDEDFIFSLYPNDLIEVEHKRKLKFTIANSESSRPKTLEVGKALVYYVSGNISVGSITIKTHDGSYVIASMGIKTLKSIKKFEVDVLGNYHEVKKEKRQTFRKK

SEQ ID NO: 28 - protein, 1089 aa, unidentified
  REGION 1..1089: note = Synthetic sequence or unknown origin
MKYAIGLDIGIESVGYAVLELDSHDQPFRIERLGSRVFDRAEHPKDGSSLAVPRREARGARRRLRRHRHRLERIRGLILSSGILSGAELDALYKGQLEDIYALRTKALDELVSREAFARILIHLAQRRGYRSNRKADAADKENGVLLAAVSENQKRCEEKGYRTVGEMFYRDEAFAIYKRNKQANYLNTVDRASVEAEARLIFAAQRERGAAYASEETEAAYLDILLSQRSFAEGPACGPYSGNQVERMRGKCTFEEGQLRAAKASYSFQLFNLCQHINHIRLSAKGVTRSLTDEERQQVYELAHEKAEVTFAQIRKLLHLAEDEDFVGIRYEAGARAKAEKNAKLKDLENYHKIRKCISAYSAEAFAELSYDQLDAIGEALSKNQSDADITGELTAAKLSPQVIEALLTLPNFAKFGHLSVMACRKILPFLQQGYTYDKACEAAGYDPKANNGKPELYLPSLPKNQSEITSPVVLRAVSQTIKVVNAIVREMQGSPVYLNIELARELAHDKKERDEIKKAQDKNAETNEQLMEQLREYTDGKIGGQDLIKMKLWQEQDGRCMYSGEAIEIERLTEPGYVDVDHIVPYSICFDDRMANKVLVLTAENRQKGNRLPLQYLQGKKRDDFIIRVEQSNLKYAKKSRLLKESISDEAEWKQRNLQDTQFMASYLHRYISEHLLFAPSDSGRKRRVTAVNGAITAYVRKRWGIRKIREDGDLHHAVDAVVIGCITQGMINRISRYSYYKETKDNGDYIVDEQTGELITRFPTPWAHFLDELSIRMTQNAKNMRKQLFDANYDSYAEIDLETVMPPFVSRMCNHKSTGSAHLETVRSGKLLDQGKVISKVALTALKLDATGEIANYYNPESDRLLYEALKERLQAHGGDGKRAFADGEFRKPKADGTPGPVVKKVKVIDTVSNVVQVQDQTGVANNETMLRCDVFRVEDDGYYFVPVYVADTVKPQLPSLAPIAGKDADGRKRWKQMREEDFLFTLYPNDLIRIYSKKPFSLNVVNKKSTLPEKMTVPGEEGVFLYYRGMNISTAVLNAITHDNTYSHDSIGKTMQRIEKYEVDVLGNIRRIGEEKRKDFSHKKK

SEQ ID NO: 29 - protein, 1089 aa, unidentified
  REGION 1..1089: note = Synthetic sequence or unknown origin
MKRYAIGLDMGVASVGWAVLALDEEEKPIGIIDLGSRIFDAAEQPKTGASLAAPRREARGARRRLRRHRHRNERIRGTILRYGLLTKQELDQLFDGQLEDIYALRVRALDEPVSRQEFARILINLSQHRGFRSNRRNAVDGEDGKLLTAVNENKRIMETEAYRTVGEMLLKDKRFEEHKRNKGGDYISTVSRDMVEDEVHCIFEAQRKFGADFADKALESDYIEILLSQRSFDEGPGGNSPYGGNQIEKMIGECTFIEGEPRAAKASYSFEYFSFLEKINHIRLVNGKESVPLSEAQRKKLIELAHKSDSLNYAKIRKELSIDDDYKFNMVRYDKSSEIVEAAEKKEKLVCLKAYHQMRKAINSLSKDLFAQVTKEQRNTIATVLSLYKSSEKIEAALRAKGIEPWLIDAADKIGNFSGFGHLSIKACDMLIPYLEQGMNYNEACEAAGYNFKVHKSEEKSKYLKCCQEDFEDITSPVVRRSIAQTIKVLNAIIRKQDCSPVYINVELGRELAKNFQERNKISKENEENNKRNEAAMERLKSEYGLLNASGNDLVKFKLFQEQDGICPYSLKHIQIEHLFEPGYAEVDHIVPYSISFDNSYKNKVLVLAKENREKGNRLPMQYLTGQRKDDFVVWVNNNVKDYRKRQNLLKESISEEEKKQWKERSLQDTKYASRFMMNLINDRLLFAESTTGRKKRVTAVSGQITSTLRSRWGINKIRENGDTHHAVDAVVIACATDGMIQQISRNVRLRECQYMQHESGSLAIDSRTGEVFREFPFPWPDFRRELDARLANDPARVINDLKLPFYMNSGEPLPKPIFVSRMPKHKVTGAAHKETVKSGKHIEEGIVLVKRSLKDLKLKNGEIENYYNPDSDRLLYEALKARLQEFNGNAEKAFAEPFYKPKRDGSQGPQVKTVKLVEKTTLNVPVQNNQAVADHDSMVRVDVFYIDGDGYYLVPIYVADTLKAELPNKACVAFKNYSEWKPMSDDNFVFSLYADDLIRVEHKKEMKFALTHKESSLPPEYNTKDKLVYYTGMNIATGNISIETHDGAYKIGSLGVKTLRKFEKYTVDVLGEYHKVEKEKRMKFNIKN

SEQ ID NO: 30 - protein, 1090 aa, unidentified
  REGION 1..1090: note = Synthetic sequence or unknown origin
MNKYAIGLDVGIASVGWAVVKLDESEKPCGILKMGSRIFTAAEHPKTGASLAAPRREARGARRRTRRHRHRNERIRNLLINSNVISQSELDNLFNGKLEDIYSLRVKALDEAVTRAEFARMLIHISQRRGFRSNRKEGASAEDGKLLTAVSENRQRMEEKGYRTVGEMFLKDPLFEQSKRNKGGDYIATVDRSMVEEEVRKIFSAQRGFGAKFASEELESAYLSILLSQRSFDEGPGGNSPYAGNQIEKMVGRCTFYPEEPRAAKATYSFEYFNLLEKMNHLRLVSGGSSITLNSEQRTKLLDMAHKSESITYAKIRKELPIPEEYTFNLVHYADDVAVEESEKKEKFSYLKSYHKMRKALDKVSKGRIVGMPIEHRNAIGTALSYYKTSEKITEYLTEAGLETVDIDAAEGIGNFSGFGHLSVKACNELIPFLEQGMNYNDACAAAGFDFKAHSGGEKSKLLHLSEEDMESITSPVVKRSISQTVKVINAIVRDQGESPIYVNIELAREMSKNFNERTKIKKENEDNRAKNAAVLERIQSEYGWHNASGLDIVKMKLYEEQGGVCAYSQKNISLERLLEPGYTEVDHIIPYSISFDDSYKNKVLVLTKENRDKGNRLPLQYLTGERRDKFIVWVNACVRDSKKRKILLTETITDDDKKKFIDRNLQDTKTASRFLLNYINDNLEFAPSDCGRKKKVTAVNGAVTSYMRKRWGITKIREDGDLHHAVDALTVACTTDGMIQQISRYSAYRECEYSPTDVASVAYDPDTGEVIRQFPYPWPNFRKELEARLEDDPGRVISELKLPMYELGLIPVPEKPIFVSRMPNRKVSGAAHKDTVKSPRALDDGKVVVKKSITELKLKNGEIENYYDPNSDRLLYDALKKRLEAFGGDGKKAFAEDFHKPKSDGTPGPIVKKVKVYEPTTLNVSLHDGKGVADNDSMVRIDVFHVENDGYYLVPIYVADTLKPELPNKACLAHKPYSEWKEMKDEDFVFSLYPNDLVEVCHKKVITLSVSNKGSSLPETLSDKSMLLYYTGADISTGAIAGVTHDNAYKARGIGIKTLASMTKYTVDVLGEYHKVGKEKRQPFNIKRR

SEQ ID NO: 31 - protein, 1090 aa, unidentified
  REGION 1..1090: note = Synthetic sequence or unknown origin
MRYAIGLDVGIESVGYSVLELNSYDTPRRIESLGVRIFDRAEHPKDGSSLAAPRREARGARRRLRRHRHRLERIRGLIISSEILTKDGLESLYDGELSDIYELRTRALDELVSAEDFSRILIHLAQRRGYKSNRKSEVSNEESAGKILTAVSANKKLCEEKGYRTIGEMFYRDERFSEYKRNKNDDYSTTIDRQSVEDEARMIFKSQRVKGAKFADEKIETAYLDILLGQRSFAEGPASGPYSGNQIQRMRGMCTFEADEFRAAKASYSFQLFNLWQHINHIRLIRGGETIALNDDERKLIFELAHEVTELNYAKIRKHLKISDEYNFAGIRYEQGKSAEAEKKSKIKDLEVFHKIKKCVTAVSSNGFEELTHEQLDAIGEALSKNMSDDDILKALEEAKICRPISEALLELPNLSKFGHLSVKACRKIIPFLEKGCTYDKACEGAGYNFNSVKKELKVYLPPVSKNDTEITSPVVKRAISQTIKVINAIIRDMSGVSPVYINIELARELSKNYNDRNKIRKSQDENAKKNEELMEQLKEYGGTPGGHDIIKMKLWNEQDGRCMYSGETIEIGRLTEPGYVDVDHIVPYSICFDDRLVNKVLVLSKENRQKGNRLPLQYLQGKKRDDFIVLVNQSHLKSEKKRRLLMEKISDESEWKQRNLQDTQFISSYLRRYIDENLMFAPFYDNRKRHVMAVNGAITSYVRKRWGINKVREDGDLHHAADAVVIGCISQGMVNRISNYTYYKETKDNGDYVINEETGELETRFPTPWKHFTDELNIRLTQNKKSLQKMLFDVNYDSYSDVDIEEIRPLFVSRMPNHKVTGSAHEATVKSGRLEEVGYTVSKVSLTKLKLDKNGEIQGYYNPDSDKLLYEALKKRLLEFDGNGEKAFGNIAFYKPKSDGTQGPLVKKVKVEDVSSNMVKVQQGSGVASNDSMVRCDVFYVENDGYYFVPIYVADTVKAELPNLAPIAGKDSNGQKKKKVMKAEDFMFSLYRNDLIRIYSKSTITVNKVNQKSTLPEKMTVPGEEGLFLYFSGMDVSVAFLSGITHDNTYKHRSIGKTTLCIEKYDVDVLGNVRKIEKEERKDFLNRKR

SEQ ID NO: 32 - protein, 1090 aa, unidentified
  REGION 1..1090: note = Synthetic sequence or unknown origin
MIYIIGLDVGISSVGWAVIRVDKDCRRIEDFGVRIFDSGETRDRKQSKCQERRSFRGSRRLIRRRKHRKDRLKYFLNEISFVTEKEMKDFYGHNNHDIIDLRVKGLEERLTPEELTACLLHIAKFRGYKPFYDFEKVNLKTEDGKLLLHMNETNKIIEDGGYRSVAEAIQKDSYFKEETTGRYRFHNKSDKNDILFSNGMIKKEVETILNCQKQYYSQLSDKNIEKINDIIFSRRDFEDGPGNSGDKNRKYTGFYDSIGKCRFYKDKNRGCRFTVLGDVFALINKLSQFKYVSIETGEVDKMPKNLMHTIIMKAIKDASLTKKGIIKIAKEQGFTLVSGNEEKDDNTDITNCLKFVKPMKKIFDADDSGFEWEKLINEDPTNMDSLLNRIGVLLSYNITPNRRLEKLNSISEIRDNAIVERLSKVKLSGTANVSNEYMIDAINAFREGQLYGDFQANVIKDDFSSDKNATRHKKLPPFTKDSEIYDNPVVFRSVNECRKVVNAIIERYGTPSAINIEVASDLNRSAENRKKLANNQKKRRDNNASVLKKVADLLGVEESEITKSQLDRFKLAEQQGWRSMYSGDNLYSDDKGKITDKDKKAIILNTNKVYEIDHIIPFSRILDDSLNNKVLVFAKENQDKSDRTPLMYLEGDSRKEFIKRVNSFYQSKNENKEIGSISKIKYSYLMLDSLTSEETLKYLEEWKIRNLNDTRYMSKYLMKYFNDNLLFEENKDSRRPPVYAVKGAITSMLRKQWLNKKTWGNLDKKKLKSVTNLDHAIDAIVIGNCLPAYVEIAVENIKLRDIYYSSGKKKTEEYYRSRDTFIDNLWKFYGVPKSESARLLEKMTETPSLINNLRQEVECRVQDYGTMQFFSKDDNGKTKEEWDEIYRRNITNFYVGQKDFVDSIQMPIVSHKQDKRFRGKIANSNFVKTTDDVSKFYKKQIDENNFAYMDDRSYYCVDVYKNHKGNTKITALKYNDIIKKNGKLYLKQDYKFPEDYREHLMYLYSGDFISVENKNSKYYGYYVSVKNINRNLLNIDECFYENKVIDYKKRIERAITERSIVKKYYIDILGKIGGEIYKCGEPLSYLPEKD

SEQ ID NO: 33 - protein, 1090 aa, unidentified
  REGION 1..1090: note = Synthetic sequence or unknown origin
MKYGIGLDCGIASVGYAVMQLDENDDPCRIIRLGSRVFNKAENPQDGASLAAPRREARGMRRRIRRHQHRLERIRYLLVSSGVLSKTELDNLFCGQLSDIYMLRAKALDEPLTAAEFSRVLIHLAQRRGFRSNRKTDAQDKEAGKILSAVSENTEEMERGGYRTVGEMFYKDEKFRQYKRNKGDDYAATVARSMVEDEMHKIFEAQRRFGMSFASKALETQYTEIALSQRPFDLGPGAGPKNAPSRYAGDQIGRMIGPCTLLPEEKRAPKASYSFQVFTLWQNINHLRIAAPGKEAHGLTDEQRWAVFELCHQKKDVKYTALRKLLALRDDEFFSILSYGAKEAAEVEKAAFNFLKPYHQIKTALNKLGKDYIRNLSADELDDIGYILTVQKTDDSIRPALEEKGFAPEVIDALLSCGSFSKFGHISVKACQMLIPYLEKGMTYDKACDAAGLDFRAHSKTEKSLYLSANSDYLCDIVNPVVRRAVSQTIKVVNAIIREQGCSPTYLNIELARELSKTFDERKKAEKSMKDNAALNSRVVERLQTEFGIVSPTGLDIVKFKLWQEQDGICPYSQKPILLEKLFAPGYVDVDHIIPYSICFDDSYNNKVLTFSKENRQKGNKIPMQYLTGKARDDFEIWVANTIHNRVKRQRLLKTELKPEDTEGFKTRNLNDTKYLSRVLYNFINDTLLFADFASDRKKHVRAVNGKVTSYMRKRWGISKIRADGDLHHAVDAAVIACVTERMIQKVSTYSKYHEIYYVSDDEKSFAVDFNGEVIDEFPQPYPYFRKELDARTMADAKRAVKDCRFPHYSAAQEEAVQSCFVSRMPMHKVTGAAHLDTIRSGREPGFVISKVPLAKLKLDKDGEIQNYYNPESDTLLYNALKARLAAYGGSGEKAFAPENGPMYKPTASGEPGPLVKKVKIIEKSSLNVPVRDENGVAANSDMVRIDVFKPENDGYYFVPIYVSDTVKPELTNKACVAFKNASEWKEMQEADFLFSVYPNDLLRINAKKDIKFTVSNKDSSLPKEILRNDVLVYYNSANIHTASILVLLHDNSYRLEGLGIKTLLSLEKYTVDPLGNCSKVGKEPRQRFR

SEQ ID NO: 34 - protein, 1357 aa, unidentified
  REGION 1..1357: note = Synthetic sequence or unknown origin
MKKFYLGMDIGTESVGMACTDENYNLLRAKGKDLWAVRLFDEAKDASERRIKRTARRRLQRRRQRVEFLQGIFAPFMEDELFFIRLNNSGFFEEDKDERLSSQFSLFNEKDYTDIDFYREYPTIFHLRQRLCCGERADLRHYYLALHHIIKYRGHFLFEGEDVNGIRDIKKLFENYNNAVEEIEMDDLYLLVEKAEEFRSLAMERKGLNDKKKAIVKLFNATSPQLKEMLALLIGAKAKMSVIFGEEYEEKYKDEKISFKEIDDDAFEQKSEIFEEEQFAILKRAREIYNFIVLEKVLEGKGTISEAMVALYDKHAEDLKLLKKLVKQNYSKETYYKIFRSLKESANYVNYVGYNKNKGKKINASKKCKKDEFYAFLKKNLTEIQGEGAEILNYVKAEIENGTFLPKILNADNGLFPHQINGMELDLILQNLAKNYPEFADKDDSGFTACEKIKKTFLFKIPYYIGPLNTAHENGGRGNSWMRRKEGKIERITPWDFDEIVDKAASNEQFIRRMTNKCTYLHNQDVLPKGSMYYQAFNTLNQINKIKLDTVPISVELKQELFHNLFLKNKKISVKQIREYLVLSGRCTLAEAKELSIGGFDTEIGLNATMSSYRLFADKFGAMVDENPEIFENIILWHTLNTDKGIVENLIKQKYGTIPQIKENIKWLKGLTSFKEFGRLSKKLLDGIIGGIDPATGEAYTVLNRLYNTNYNFMQIMEVYEFAKAVEEENSGLKEEITYEDVASLYVSPMVRRGIWQSLIMADEYVKAVGKAPDKIFIEVTRRDEEKKRTISRKNSLLALYDQIGEDCANIDELVKELNCDEITDSKLRQERLYLYFLQLGRCAYTGERIELNQLATDLYDVDHIVPQSITKDDGIDNKVLVKRVKNAQKTDIYPLPLGFTNQQSFWKLLKIKGLMSENKYAKLTRVEPLTEDDFREFTNRQLVVTNQTVKAVAELLKAKYGAFGTKIVYSKAIHVDEFKQKNEIIKCRETNDLHHARDAYLNVVVGNVYDTKFTSAMDYYYRKADDSWREYNLKTLFYRPIEGAWAGSEDINRIKKIVAKTSMSVTRYAVTNHGAFYNETVYKKDDNATYPRKGKAPYDQTEKYGGFKSPATAYFAIVKSKDKKNNVIKTIEAIPVMVDYAVKNNQNAIIEYLHGMGLIEPEIIVPKIKIKSLVSINGYKVWLAGMTGKQILIHNAQQWFTNSNTDLYVKQLIKLIERDRAGRLSILEKEQEQIPLMSNRFNDNLYATKESNLQLYDAIIKTLNKNIYQGLSSVKSFALKIGEKRDLFIALTTFNQIKVLLQIIRFMKCNAECADLTLLEDGATCGKLLIGKNITDVEFAIIHQSACGLTERVQKI

SEQ ID NO: 35 - protein, 1097 aa, unidentified
  REGION 1..1097: note = Synthetic sequence or unknown origin
MAYAIGLDIGIASVGYAVVALDYEENPWGIINMGSRIFDAAENPKDGASLAAPRREARTGRRRLRRRKHRIERIKNLFLNTQLLTKEQLEKLYEGVLSDVYELRVKGLDEKLTAEEVARVLLHLAHRRGFKSNRKAEKTDKENGALLTAVSENQKRMKDKQYRTIGEMFHKDELFAEYKRNKGGTYLTTVAREMIADEAKYIIATQRSFGNKTLTIEFEESYLDILLSQRNFDEGPGGNSPYGGDQIERMIGNCTFEKSEKRCAKSCYSFEYFNLLQKINHLRLLVDGVKVELDGSQKSKVINLAKTKADLKYSQIRKELGLGSQVLFNALVYNSDVEEVEKKSKFNFMPAYHQIRKELDTVVKGRIEAIDIDTLDEIGRILSTYKSDAKRIEAFSNLNITSKDMEALLNINGLRKFGHLSLKALKKITPFLEQGMIYNEACTAAGYEFRGHSGYEKTFLLPSQTEEMENVTSPVARRSISQSIKVINAIIREQGESPLYINVELAREMAKDFDERKKIKKETDENQARNERLIEKIRNEFHKQNPTGLDLVKLKLWEEQDGVSPYSQKQIVIERLFEPGYVDVDHIVPYSISFDDTMKNKVLVFASENREKGKNLPVEYLARKKGQKAVDDFKVWVTSNVRNYKKRLNLLKSEVTEEDLNKFKERNLQDTKTISRFMYNYISDHLIFAPSETGKKKRVTAVNGAITSYLRKRWGINKVRADGDKHHAVDALVIACTTDKLIKDLSYHSRYLEMEYEAGEKESLWVNRNTGEIVKRFPYPWEDFRAELMARLSDAPEVALRKLQLLYYQDKDLSKIKPIFVSRMPRRKITGAAHKATVRGARYVDKGIVISKKSLSELKLNKGGEIENYFAPESDRLLYEALKEQLKKFNGNAKKAFEQGFYKPKADGTPGPKVNKVKVYDKSTLNVAVQQGTGAADNDSMVRVDVYKVEGDGYYLVPIYVADTLKKELPNKAIVQGKTYEQWKEMSPEDFVFSLYPNDLIKITHKKEINFSRVSEDSTLADSYKTKEEFVYYKKTSISTASISIINNDNTYTIPSLGVKTLASLEKYQVDILGNYTKVGKEKLQTFAAYQQAKKKP

SEQ ID NO: 36 - protein, 1098 aa, unidentified
  REGION 1..1098: note = Synthetic sequence or unknown origin
MKHIRYTLGIDIGIASVGWAVLQNDVYGEPVKIDRLGVRIFERAENPKDGSSLAAPRRQARGSRRVIRRRKHRKDRIKKLIASSGMMEQEQIDTLFTAGRFEKSVYELRVDALERKLSVEETIRLLIHFAQRRGYQSNSKSEEAKDAKENGKVKQAISDNRQRMLEHGYRTVGEMFWKDDLFKRTNPDGSVVLVVHNQPDDYKVTVERQMLREELQLMFAQQRAFGNEWASEAFESAYLEIWGSQRSFDEGPGGNSPYGGGQIERMLGTCTFEEDEPRAPKASYTAEYFRLLQTVNHLKTVGRGLPPEFLDEEQRKLVVEFALASPNGTYGQLRKKLSLPDDVYFNNLYYGNKSAVEVEKKKLGLMPFYHKVRIALDHVKKGAIQEFSAEQLDKIARILTLYKSDDNRTQYLRKAQIPEQYIPELLALSASKAAHLSIKAMQKMIPYLEDGCTYDKACTAVYGRHDGKKPGEKRSQKLDIGMAGEITNPVVRRAVSQTIKVINAVVREYGPPEVVRVELARELGKPYEIRTKLEKRQSANFEQNAAIRSQIEEYKKDTPTGLDIVKFKLYQEQNGVCLYSGENLDISRLFEAGYVDIDHIIPYSISFDDSYHNKVLVRSRENRQKGNRIPYAYFGQDEVRWNRFETLVNTQIRSFKKRKNLLCHTLSPEQIDGFKQRNLVDTQYLSRVIFRLIDEHLEFAETGNVKRKTQTVNGAITAQVRKRLGIDKVRANGDLHHAKDAAVIACISPGMIQKITRYSQRCECAWTRAGYVDYETGEVMTKEAYDEKYAPRFPAPWPQFRAELEARLSVDPRGEIDQLKLATYDSDEALFPVFVSRMPNHKVSGPAHQETIRSGKQAGGTVSKVALSTLKLDKTGEIPGYYRPEDDPLLYEALKERLRAYDGKGDKAFAEPFYKPKHNGEPGPVVKKVKVFDKATLTVPINHGLAANGNMVRVDVFRVEDEGYYFVPIYVADTVKGELPCRAVVAHKAVEQWKGMDEKDFVFSLYAGDLVHIVNHKAIKLNLAKGAEGNEVALTNDALLYYTGLNIATGALGLTTHDRRYCQSGLGGKTLDLIEKYQVDVLGNYTPVRLPEKRMRFQ

SEQ ID NO: 37 - protein, 1103 aa, unidentified
  REGION 1..1103: note = Synthetic sequence or unknown origin
MSRLVFAYDLGIGQTGWAVVDADSRDIIESGVNNFPSGDAAENQERRGFRQMRRMHRRKKTRMADFEKLWVSSGFSVPTLSYTDVLSLRNRGLSENLTEDEIFYVLRFMLKCRGISYLEDELNEDATGEYERAIALNQKELQNKLPCQIQKERMDKYGAYRGEREVEIEGEKVALRNIFTTDAYKKEIELFLQVQARGNKKITDSFVKSYQEIFSRKREYYVGPGNELSRTDYGIYTTIKNPDGTFHTDENLFDKLIGKCSVYPEERRAAAASYTAQEFNALNDLNDLVINGRKLDEEEKRLIIEEYKSSGVVNVNRILKKAIGENIDSITGFRVDKDGKELFHTMEIYRKMVKFFVEKGMDITTFSIDELDRIGEILTINTEKDGIIKAFQNSFVKCDANIVDAFVEFRRKNVRMFTKWHSFSVKIMSELIPEMYAQPKNQMVLLTDMGVFRSRSERFIECKEIPIRETTEEIYNPVVRRSVSMAYRITNALIEKYGYPYKVVIEMPRETNSDEEKKKIGEIQRKNEKELSTIIKKIRDDYGFEIKDEDFRNHKGLVLKLKLWNEQGGKCLYSGKEIPIDQLVKNQGLFEVDHIIPISISFNDSRSNKVLVYASENQKKGNRTPLSYLSGVNREWNDEVFTAYVKSLGYGKDKQDYSGKEKLKNLLFAEDITKQEVVQEFVNRNLNDTRYASREVLNTLKDYFKAKEAGTIVSVIRGAFTHQMRVNLELSKDRDESYRHHAVDAMLIAFSQLGYDAYLARQKQIIDFETGEILDKASWEKQDSLYRKLVYQETWYQTRIKINEAEKQVKFYHKVDRKCNRSLCKQTIYGTREYEGDKYVIDKLDLYVNSDVDRFRKMISDGKEKDFLMYENDPKTFENLMTVFHQYETEKNPFVAYNKETGDFVRKYAKNHNGPKIEKIKFRKEKLGSCIDISHKYGLEKGSGRVALRSLKPYRMDVYRNKNTGLYRFVGLKQSDIKCQGNNYVIDEEAYAKILLSEKMIESGQTRTDLGDRGWEFQLSFYRNDIIQYEKKGVIYTERFLSRTMPEDCNYIETKPIDAPDFKKRNLVGLSQTKSVEKIITSILGNQRNVKREKFSEIVDTIR

SEQ ID NO: 38 - protein, 1104 aa, unidentified
  REGION 1..1104: note = Synthetic sequence or unknown origin
MGITFGFDLGIASVGWAVVNDDYEVLESCSNIFPAANASENATRRGFRQSRRLTRRRKNRISDFKKLWKSAGFDIPEGSKTDVLELRIRGLSEQLSDRDVFFVLLNSLKHRGITYLDDAESGDQSSDYAKSIAYNETELKSKLPCEIQYERMQKYGAYRGNNTVDVDGEPVTLRNVFTKSAYKKEVEAFLSKQSEFNPMLTAGFMSDYMELFSRKREYYIGPGNEKSRTDYGVYTTELDESGKYKTEANLFDKLIGKCSVYTDERRAAGASYTAQEFNILNDLNNLTIQSDSSKLEDGKLTESAKREIIEQIKTANVVNVKRIIGDVLGDKNCTISGARVDKNEKEIFHSFEAYNKMRRELSDVYDIKTIPREDLDDIGEILTLNTDRESILNAFAMRGLKYPQEVVDVLIKVRKSNGALFSKWQSFGLTIMKELIPELYAQPKNQMQLLTEMGVFKNQSDRFMEYEEIPADVLTEEIYNPVVAKTVRITVRVLNALIKKYGNPDRIVLEMPRDKNSDEEQQRIRKEQRDNENELNNILAKVKKDYGREITKNDFINHSKLTLKLKLWNEQDGVCPYSGKPIHIDDLLDNPSLFEVDHIIPLSISFDDSRSNKVLVYSEENQKKGNRTPYAYLTGVNRDWDFHNYMSFVLDHYSGALKRKKRDNLLNDEDINKVEVLKGFVNRNINDTRYASKVVLNSLQQYFASKDCNTKIRVIRGSFTHQMRMNLQLEKVRDESYSHHAVDAMLIAFSQMGYEAYRKLTEEYIDYDNEEVLDKDGFNHLLDRDEAYKNALYQAKWVAIRKTIQNAEKRNKYWYQVNNKCNRALCNQTVYGTREIDGKTCKISKLSIRTDDGIKKLKGILAKGKPERFLMRRNDPKTFELLMDIYQRYEDAKNPFLQYEEETGEKIRKYSKKGDGPVITYLKYEDGEVVSCIDISHKYGFEEGSKKVILDSLNPYRMDVYYNNTDGRYYFVGVKQSDIKCEGDVYAIDAEKYTRTLINEKMLEEGQTLADLPKLGYEYRLTFYKEDLIEYEKAGEIKCERFLSRTKPQSRNYIETKPKDAPKFEKQNQFGLAQTNHIRKIVTDILGNQYYVDQMRFNMVVSRR

SEQ ID NO: 39 - protein, 1107 aa, unidentified
  REGION 1..1107: note = Synthetic sequence or unknown origin
MISQSLTFSFDIGYASIGWAVLEANPDGSQDADPVVQGCGTVLFQADDCQAFKRRSYRRLRRNIRSRRIRIERIGRLLVQTQIITQNMKDAPGHPAPFYLASEALQEHRVLSPLELWQVLRWYAHNRGYDNNASWSNSSSAVENKEDTEKLRNGHELMKKHGTCSMAETICRELKLEEGKQDAPMSFSTPAYKTLNTAFPRSHVQKEVRQILELSAPQIPGLTPEIIELIVQQELFTTEQRERLLQFGIKLARRYQGGLLFGQLIPRFDNRIIRRCPITWAQIYEAELSLGSSEKQAREKAEKLSKVPSADCQEFYEYRMARILCNLRADDQPLPASLRRQLMKEALKEGKLTKSSLKKIISSQALTENTNIDNYFNLHPDSEEALYLDPAVEVLQRTGIHDVLSPSVKRMALTRLRRGKTCTPRYLLKLMRSHGEPVDQLEAKIEKRRIQQGERKKGKEHVPAGKDWAEEPLLPKCATGRAPYARPVLRKVVEEVLAGEDPSRPARDENHPDGEVKTHHGCLYCLLDPKSKVNEYQRNRSIDSLTNNHLVRHRMMIVERLLKDLIQDFAAGRKERVEKVCIEVARELSSFSGMDSKKIQAELNLRQKSHAMAVERLEKDLPGLALSANLIRKCRIAEDMNWTCPFTLQKYGPHDLDRLELEHIVPYAFRQSNALSSLVLTWKEVNKMKNRRTGYDFVEQCEGSPVPGSNLSICSINNYKTFVNGLDERKWHADDQKRKKKRKALLMVRGLSSKNQAQANIGMTEGMMTQSSHLMKLAARVVSRILPDVSIDMIPGAVTAAVRKSWDVSGCFKELCPELSGKINKQDLRSCTHLHHALDACVLGLIPYIVPAHRNGLLRRVLAMRRLPEELMREVRQIADKRHYILNDDGRIMLKDLPNSVKENIREKLMEQRVIKHIPANMSGASLKETMQRVISIEGNGEDAMVCLRKSSFMVGEDGKRTTVKANKLVGIFPEGSSKLKPLKAAIEIDGNYGVALDPSPVVIRHVRVFKQILALKKKNGGKPVRILKNGMLIRLTSPQDTKREGIWRIASIKDNKVGIALDLQRPHYAGSGSKKHESNWINIRLVTLRTKYHLEIHPTSYTGNPR

SEQ ID NO: 40 - protein, 1110 aa, unidentified
  REGION 1..1110: note = Synthetic sequence or unknown origin
MHNRYTEYKPFDCFIIGGKTGIRMDKWNYAIGLDIGIASVGWSVVALDSQGDPYGIIKLGSRIFDKAEQPKTGESLAAPRRQARGLRRVIGRRALRKEDIYKLLAKHNIVTKEQMMEIFRTGHLEDIYELRTKALDELVTRTDFARILIHLAQRRGFKSNRKSESSDEGKLKDAVRRNQILMEEKGYRTVGEMFAKDELYSRHKRNKGSEYTSTVLRDNVIGEAVLIFESQRSLGNSWASEELQESYIEILSRQRSFDEGPGEPSPFHGNQISRMVGKCTLEPEETRAAKATASFEKFTLLQKINHIRVSNEDGEMVPLNVEQRQKVIDLAYKTPDVTFLKIRKALELHEYDRFNLARYRTTDSVEKAEKDEKLKCLNAYHEMRKALDGIEKGHIQKFSDEQLNKAAEILTRYKNDSTVINLLQEEGFSPEEADALSVLSFSKFGHISVKACRKLIPFLEQGLTYDKACKEAGYDFRGHNSAKSMYLPANTEQGAPELQDITNPVVRRAVSQAIKVINAIIREQGCSPAFINIELARELSKDFAERNQITKDLEKNTAENERLKEELLELVHGKTIGGQDLVKYRLWKEQDGRSAYNGKPIEIERLLEPGYAEVDHIIPYSISFDDRRSNKVLVFAYENREKGNRLPLQYLEGKAREDFIVRTETTVKQYRKKQNLLKEKNTEETAEFRQRNLTDTQYLAVLLYNFITDHLEFAEGTEFGKRRVFTVNGAITSFLRKRWGLTKVREDGDLHHALDATVIACTTNRMIQLISGYYARIEGTPYLSKKGKELFPQPWDHFRDDLVLRLSDTITPESLYLVNPVFYHSFGAENIKPVMVSRMPRHKVTGQAHKETLKGTKALKDGYLTTKKSLRDLKLNKDGEIADYYNPESDLLLYHALKEQLQKHSGDGKKAFPEGSHFYKPKSDGTPGPEVRKVKLIEKSTLNVSLNDGTAFADNGSMVRIDVFRVPEEGYYFVPVYVADTKKKQLPSKAVIAGKPYSKWKEMDDKDFIFSIYPNDLLFFEHNKGINWSVKHKNSTLPNQKEATELFGYYIKAGIATATISIINHDNSYMLSSLGIKTLKSLKKFQIDILGNISEVKHERRTGFNQRSGG

SEQ ID NO: 41 - protein, 1112 aa, unidentified
  REGION 1..1112: note = Synthetic sequence or unknown origin
MKYRIGLDIGIASIGWSVLETDEAGEPIRIADLGVRIYDVPEDPQTGDSLAAPRRQARSLRRLIRRRSHRVDRVKSLISLTFGDEIVAELEKNKPLDIVALRVKGLDNELTPYEISRLCVYFVKHRGFRSSKKAGSKDKDEGVLLTATSENRKKLIEGGYRSIGELLYKEYSGYTLRGDRVYLYRNKDGKYDNTFLREDLLAEITQILDKQIEKGIITRDFAQKYAEIFTSQRSFDEGPGKGSPYSGTFAIGLCTFERKNGYERAPKASYTAEYSIALQRLNNLMPVRRGEQLPLTVEQRGAVLAEIEKCKEIKFDKLRKILGYDKDDSVRFNLLSYSKDKTVKAVEGAVFVTMRNSYDIRKALSYHDNPTPELLDGVAEIISKYKSLDRQESELLKLDGTITNEEIEAIGKLDATKFVHLSLYALRKIQPYLYEGYKYSEACEKAGYNHSDFSGDKRKLLKGEDITELINEIGSPVVRRAFSQVIKVINAIVLKYGNPVGVNVEVARELSKTLDERRKIQKDNDSRHVENERLKERIRSDFGVEAKGLDIIKLRLYEQQRGKCAYSGEPIDISALFHDPTAYQVDHVIPYSRSFDDSFKNKVLVKTSENQNKKNMIPYEYFGLDEKRWAEYEARVGTFDFPYAKKQLLLRKSFTEEDESNWKDRNLKDTQYISRLVYNVIQNYLLFDESVQAKKKVRAVSGGITSYLRKMWGLTKVREDGDKHHALDAVVIAVVTDKYVNNISRYNKNKELFFGEKGVYIDYETGEVISREEFDARYGKKLNPPYGEFVDELKIRLMDECEETDLYGMVHKGIRQCYLDKLAEFGYNEEQLNAVKPIFVSRVPNRKAKGALHKATVYSNKYNNPEHGKVIVKKTPLKDLKLDKNGEIAGYFSLARQSDPALYEAIKERLKAFNNDGKKAFEAEFHKPTKSGELGPVVRSVRTEEKGSIGLTLEAKKGYVKNESMVRSDVFYKDGKYYFVPVYVKDIARGVIPNKAISAGKDYEDWDEMKEEDFLFSLYKNDLILVRMKNDISLVKPRTKEKYAGKSKEMLLYYKGVDSSTGNVSIIVHDNSYEGRPGLKTALSIKKYTVDVLGNVTEITKKEKRDTLGKKK

SEQ ID NO: 42 - protein, 1113 aa, unidentified
  REGION 1..1113: note = Synthetic sequence or unknown origin
MNYRIGLDIGIGSVGWAVVSSEGDGHPARIEDFGTRKFKSGENPKSSDTLCSERRGFRGNRRLTRRRSFRKKLLLNHFKNIGLLNNTFYDDYADCKDDDVYCLKVKGLDEKLLPAELYKCLVHTCNHRGYRDFYEPDDSDEEAGKNESAANDFEKMFIKSGKRTVSEYLVSDHVSNGFVNYRNRNGGANPYLLVRRKLLQEEVALLLKKQSEFYSCLDSRNTNQIITIIFNQRDFEDGPGNPDDKSRRYYGSLGKCPFYSVEDRGFRGTVIADVFAVTNTLSQYRFVNKETGEYELEPKVAEKLIDHLLANAKLSMTDVKKILKEEGFELLKSERSDDKALGKAIKFLSIAKKCAEEAEFDWKELINEYQFDPEIPTVLHSIGELISKYQTPSRRRKEMKKSGIDERLIKTFSNKKISGTASASYKYMCDAIKAFLSGDTYGNYQANFKKVNVDSENKEKSFKLAPSDIDGADVRNNRVVFKAINETRKIVNAIIDVYGSPEDIVIEVASELGESFEMRARETKRQRENEKSNDKIKSEIASLLSIDIGDVKGAMIERYKLYKEQEGKCAYSVRPLGDIKEVVENRNHAYEIDHIVPYSLILDNTLNNKALVYTEENQKKGQRTPLMYMNEEKSQEFLSFVNHMFSRKTDSIGRKKFEYYRLETIYGEKSEEILSAWKSRNINDTRYITKYIAGLFERKLLFSGEKKQHVFTVKGAVTQKFRREWFKDSAWGEYEKKRDTYLNHALDALIAANLTKPYIEIGSDALRLISIYKSHKSRITPEYDEYLEKCIAKMREYYGFNDEYTRKLLSRTGRAPSFVPRLVDEVRVRFYDEDEKVFNENVEKLYGNEAGFIVPPHMPITSHKQEKKYKGKIADENPLKIVEIDGLPHKIKRIDIKSVSEKTLSKVYTEDKSLIGQLTTILKGKGEKYTIADYLKDNSEEYFVSKEGTLIRKISTDGGVVSNFYRKEIENGNYTYLGMLKYYCVEVYKDSKGNTKTCGVRFVDIVNRNGKLYRKEESLPGDYSKHVMYLFANDYVTIFDGKGETKFSGYYISVENINSSKFSFKLKNYSSNVIKSISREDTIKKFSISLLGKIGGEIKCSEPLPCIKEREYR

SEQ ID NO: 43 - protein, 1120 aa, unidentified
  REGION 1..1120: note = Synthetic sequence or unknown origin
MKYRLALDIGIASVGWAVLEHDENDNPCRIADFGVRTFEAAENPKDGSSPAVDRRAARGLRRTVRRKRARLDKMKKVLSQTLLDGASIDFSPCDIYELRAIALDRLIENNQLARIIYSMAKHRGFKSIKKAEESGKEASKLLGAISANSDNIKNYRSIGEMFLKDAKYFEERTKTENGKIISYRVYNIRNHADDFKNTLARADVLNELKQILLSQQKLGNKKITPDFINQVIDIFSLQRSYDDGPNAPSPFLVNFKVGDCTFFPREKRAPKGSLSYEYYTMLTTINHLRINGLSLTDQQRKILIDEFLKNKEIKVEKVKKLLKLTDNDTFTGNSKCDDNKKVLLKRMFSYDAMKALGLEDNPLLHVDLLDELALIFSLYKSDDRRKMQLGKSELTKNLTYSQIDELLKLDINKFGNLSIKAIKILIPYLEAGMIYSDACAAAGLKLPEGEKSVKLKYNQLPEIQDLTSPVARRAVAQSLKVINAVIDKFGSPCAVFVELARDMSKTFEERHRIEREQKENYANNEKLKARLVNEFGILNPSGKDILRLKLYEQQKGKDIYTGKSFQDVLGLVKAIFNDNNTQIDHVLPFSRCYDDSYNNKVLVLAEENQAKGNRTPFEYFGSDEKRWTDYVERVEALFPDDKSKKGKKNPKKVRLLNTSLQEDGAELASRALNDTKYAAKLIKSLIEDHLIFQESSMKKRPVRCVNGSMTSFLRKIWGISKERFKDDTHHAVDACIVGCVGNGLLQKVTKYLQFESYKKLPDGRYVDKSTGEIVPEEIVKEFEQKNFKFPYPTFKDELNLRLSIVENPKYYQKEFEMLGYSQEEIDAVRPLHVSRSVNKKADGAIHKETVYSKKLLNPEEDKYFVTKKTSIKSLKYDKDKDEIKDFPEEYKKADPKLYQTLLQRLREFNGDAAKAFAEPIYKPSKPGNSPNQIKTVKLQAKISDWVDVRKGVAVNDSMIRIDVFEKKGKFYFIPVYVKDMYAKKLPNKIWKSTSYKDWPELDESYSFKFSLYKNDLIKIKSKEGFKFTPTDKKAEKITTIENDMFVYYQGADRSGGKISVEILNGGKQSRTGIQTLLTFEKYEIDVLGNITKAKPEKRKEFNNVIHKYPRIKPSASVSQK

SEQ ID NO: 44 - protein, 1127 aa, unidentified
  REGION 1..1127: note = Synthetic sequence or unknown origin
MENYQYRIGLDIGIASVGWAVLETNAQGEPKRIADLGVRIFTKAEHPKDGSSLAAPRRSARSVRRRLRRRKFRIQRVKGLFEREGLITKQELEKSFQTNAVENVYELRAKALDRRITNEELAHVLLHIAKHRGFKSNRKAEAKDNETGAVLSAIRENEQRLLEGNYRTVGEMIAKDESFREDAPWNENHYIFTPRNKAGNYKHTVLRDMLVKEVHCIFEAQRSFGNDAASEKLENDFIDVFTAQRSFDMGPGGESPYGGNIIERMLGKCTFEKNEPRAPKGSYTAERFVILPKINNLRIKDSAGSERGLTEEERKLLLAESYKSKELKYTKVRKILALRDDEYFKGLNYGRKEVADVEKATFVKATATLTITKILEANGEYDFSDLADGLDEKRAFLVDEIARLIATYKEDAKRREEFEQFDLDDETVDKLLELNDSKFQHLSFVAMQKLMPYLEEGYTYNEACERVGYDFKDEYHGEKFHTLRGNEFQTIYQEELADITSPVVKRAISQTIKVVNAIIDKYGSPQAINVELAREMSRPFNERSKMEKDMLANQANNEAILKRLREEYGVAHPTGQDIIRFRLWQDQDGRCLYSGEAIPIDRLFAVGETDIDHIIPYSISFDDRLSNKVLVKAKCNREKGNRLPYEYLGNNPAEWEAFKSRVDTYVKDSRKRNNLKKEKLTEEDRKGFKERNLTDTKFATVVVTRLLRNYLEMAPIEGKHKHVTAVNGSVTAFLRKRWGLSQKDRRTDTHHARDAVVIAACTDGMIQKITRFSQLQELKHTRDRRIIDPDTGEELTFDEKYEQEWLNMYGKHLPTPWPEFREELELRMMPHPEDVVLDDPRKFNQIIGYKDDLWGKPYEQPIFVSRMPNHKTTGAGHAETIRSARLFDSEGVVIAKTALQDLKLDKEGQIDGYYNKESDRLLYDALLRRLQMYSGDAKKAFPEGEDFHKPTSTGEEGPVVKKVKIMKKQTAGVSVGKGGIAENGGMIRVDVFQVNKKYYFVPVYYADAVAKRLPNKACVALKPKSEWKEMEDQFFVFSLFPGDLFFFKHKKGMKIKYYDKSMGSVSEALCYFTGANTHTASFAGDSNDKVFSFEGMGIQSLEALEKYQVDVLGNIKKVEKETRMTFR

SEQ ID NO: 45 - protein, 1131 aa, unidentified
  REGION 1..1131: note = Synthetic sequence or unknown origin
MAQKSSYSPKKYSLGLDIGTSSVGWAILDLDKERIHDLGVRIFERPEDPQNGDSLAKPRRDARSARRRLKRRRQRLNHLKQFFVDQNILTKDQVEEVLNYKSDFNKLDVYDLRAKALTEELSPEELLKVLYQITKRRGFKSNRKVVEESDKEGGRVTSALKTNEKFLADNNYTTVGEALSRDEKFAPHKRNKRDDYTNSFARDDFLHELEAIIKTQRNYALKNVPEPAINELIYGIDDGQVTNVSAIMYQRPFMTKELIEKMVGKCTFEDGEKRAPKASYSFEVFRLASDLSHLVFIPRDASKRQAKRENLEVRLSPEQIKQVIELAKSQKSLTYKKVRSTAGISEDYVPKDVRGKKKDGDEFGEENVFGGLKAYNDIRLALKDLPEDWAKIDNESAINQIAYTLTTQKADEGIRAELDTLPLSNKAKEAIVKIKPTNFRAFGHLSIKALQKITPHILEGMTYDKACEAAGYDFKKQSASLEQITNPVVKRAITQTLKVVRAIERKYGKPYFIKVETARDLAKNFKDRKAIENENKENQTRNQSIIQTLNENGIVTPTGQQIIKVKLYREQNGVCLYSGKAIDFETMLCDDNAYQVDHIVPFSRSNNDGITNKVLVLTEENQKKGNQTPFEYFGADEKRWKEFAARVESTYKTRDIKTADKATNAINYKYNGYALKKKQNLLLQDYKNDSWNVRALNDTRYITRFIQNYLRQMVDFAEGEEKQRVIAPNGTTTAYLRKRWGLAKDRAEDVLHHAKDAAVVAAIDNSIVRQANLFAKRGEIAALLSAVKTMEEKTDKLTGEIVDEDEFDRAQRRKDAAIVLSSKHFPQPWNDFGKEVMKRTLNTDIATLQNELRGLDNYDEDFRLSVKPIFVSREIRHKIRGEAHESKLRSNRNRNGQNIIRIPLTELTLQRLENSLVKEEFDSQKNSNGSSLYEKLLARLNECNGDSKKAFNPPFKLYKGPKQDKNGNPISPVAAVKVYDKKGVVSVGRKANAPVALAEMVRIRVYKKDNQIYMIPDYRINILENKETMELLKPLKKVSKIDNSFNFIGYLYKGDLITIQKDSQTFIGYFVQFEGDNRITIKNHLAVDSSRDSKSTVKRESLSGINYLKIHKVDVLGDVNFSEGIVWPGAS

SEQ ID NO: 46 - protein, 1132 aa, unidentified
  REGION 1..1132: note = Synthetic sequence or unknown origin
MQIYVFKDIPYSGKLYTDKPETKYTLEEMKMGVRFGLDIGVASVGWAVVNDNYEVEEAGSNLFTSADANQNVERRSFRQTRRLHRRRGNRINDFKKLWLNTGLPIPATNIPDMLELRNRGLNGRLSEEEMFHVLKNELLHRGISYLDDATDGSETAQGDYAKGISQNQKELDSGKFPCEIQSERLDKYGKYHGNISVGNGEEKIILSNVFTTGAYKKEILAILEQQKKFLGFLTDSFCEKYIEIFLRKREYYTGPGNEKSRTDYGKYTTRTDETGKYITEDNIFEKLIGKCSVYKHLTRAAGATYTAQEFNLLNDLNNITVNGRKLSKDEKEVIINEVKNANSFNMRKILKKAIGEDIETLTGARLDKNEKEDFHKFAQYNAIRKEFEKNGWDITVLSREELDSIGNVLTLNTEKEAILNGFKREGLSLTEEMENCLISLRKQKSPLFSKWQSFSLDIMLELIPGLYEQPKNQMELLTDMGIFKSNKDIFKNYSSIPANAILENIYNPVVTRSIRITIQIINALIKKYGYPDQIIIEMPRDKNEEEEKKNIAERQKKNQKELDGIIKKISSEYGIKITEQDFHQHKKLVLKLKLWNEQGGKCPYSGRTINIQDLLYNPSLFEVDHIIPKSISFDDSRSNKVLVYSTENQKKGNTTPYNYLRHLSGNWGYKEYFDYVCRLRKDNMINKRKMENLLFTEDINKIEVLKGFITRNINDTRYASRMVLNTLQGYFQAKEAPTKIKVVRGSFTHQFRNNLYLEKNRDESYSHHAVDAMIMCYSQMGFDEYHKLRSEIIDFETGEILDIKRWEEEVNEKTYNELIYQNKMIQIRANIQKAEKKVKFWHKRDSKPNRGLCNQTIRGTRNDNGVIKKVNKLNIYDPSGVETLKKMINNGKQDCFLMYKHDKRTWENMLQIMEDYRETKNPFTEYENETGDYLRKYSKKHNGPRIVKLKYLDGEVGSCIDISHKYGFETGSRKVILESLKPYRMDVYYNEKDQKYYLIGVKYSDLKFNKGTYIINEAAYNKTLVSEKLIKPGQTISDLERLGYKFMLSFYKNEIIEYEKDGEYYTERFLSRTMPKARNYIETKPLDAPKFQKPQKQIGLSKTTSIKKVRLDILGNRYYSGQENFKLTVDIN

SEQ ID NO: 47 - protein, 1136 aa, unidentified
  REGION 1..1136: note = Synthetic sequence or unknown origin
MDEKLDYRIGLDIGIASVGWAVLQNNSDDEPVHIVDLGVRIFDKAEIPKTGESLAGPRRAARSTRRRLRRRKHRLDRIKYLLSEEGIIDIEAFMARYHSENLPDVYQLRYEALDRKLSDDEFAQVLIHIAKHRGFRSTRKAETAAKENGAVLASTSKNQALMQEHHYRTVGEMMYLDESFRINCPWVESGYVLAPRNKAEDYRHTILRSMLVDEVHAIFEAQRTLGNTKASPQLEEKYLTIMESQRSFDMGPGLQPDGTPSPYAMEGFADRVGKCTLEKEEMRAPKAAYTAEYFVALQKINHTRLIDANGEVRNFTAEERECLIDMLHHQREIKYAAARKALKLDTNIRFQNLNYRGKKNDDAADKMAETEKAKFIGMPNYHDYKKYLANRLHEIPEPTEQELLDEIGRILTCYKNDDTRLKYLAELGLTAEEMDSLLAFTPAKFQHLSIKAMRKIIPYLEEGYTYDKACQEAGYDFKADGNGTKNKLLKGDAVNEIINEITNPVVKRSVSQTVKVINAIIQRYGSPQAINIELAREMAKTFDERRKLEKDMQERQSSNDKVKERIKELGVISPTGQDILKYRLWEEQGGRCMYSGKVIPIAELFDRAGGYDIDHILPYSITFDDSYRNKVLVTAQENRQKGNRTPYEYMCEDEERLKEFEVRVRTTIRDYRKQEKFLKRHFTEEEKKEFKERNLNDTKYITTVVYNMIRQNLELAPFNKPGKKKQVRAVNGAITSYLRKRWGMPQKNRETDTHHAMDAVVIACCTDGMIQKISRYMKGRELKYARGYEYYDEETGEIFSPGEMSRDEWDKEFGVRIPLPWPTFKTELEIRMGEEDPLNFLNTHTDVRTEIDYPAWMYGSEDGKEKPVIRQIFVSRMPNHKVTGAAHADTIRSPRHFADDGIVLTRTALTDLKLNKDGEIEGYYNKESDRLLYQALKHQLELYGGDAKKAFAQDFHKPKADGSEGPVVRKVRIQKKLSMGVSVNGGNGIAENDGMVRIDVFCENGKYYFVPIYTADVVKKKLPNRAATHTKPYSQWRIVDDKDFVFSLYSRDLIHVKSKKGIKVNLVDNSQILKNEIYAYYTAADISTASIVGIGHDSGFKFRGLGIQGLEVLEKCQVDVLGHISVVKQEKRMGFS

SEQ ID NO: 48 - protein, 1136 aa, unidentified
  REGION 1..1136: note = Synthetic sequence or unknown origin
MSKFYRIGLDIGIGSVGYAVIENDPVTEEPCRIMKLGVRTFSPNEVDKTGESTAKNRRENRGIRRRKRRKAFRFERTRNLISKTFGKQIFDELNLLCLGDKEKGISPADVYRLRAKALDEKLSDAELCRVILHLLKRRGFKSNRKSQSSNKDDGLLLKATGENRKRMEDNGYRTIGEMLYLDPKFKREVAGKTFYDIRNHGGDYSNCFFREDLSNELDLILKTQRELGNEKVTEEFESKILEIFNSQRNFDEGPGKESPYKANFEVGNCTFIPTEKRAPKASYTFELFNALSKINNLKVNDTVLSDEQRNAIYNKIKEQKELKFEDIRKMFKFSGSEIFNLCSYKLKKEDNDLPQDEYIQKCENKVFISMKNSYEIKKKLKLESSYESRDIIDEVANILSYSKSDSKIDNAIANSEILKNLTDEQKQAIKEMNFDKFGSLSYKAMKMIEPFLLQGQRYDVACQSTGFNHSSFEHEKMKYLKGKEIDERLADITNNVVKRSVNQTLRIVNQIIKTYGSPEFISIELARELGKNHQDRDKINKQIKERTEANDDFANKLTEKFHIVKPTGQDILKYKLYEEQCGKCMYSGHPIDETRLFEPNYVQIDHILPISKSLNDSYNNKVLVIADQNQNKGDKTPYEFFGSDEERWNNFVARVMLLKNREKQRNLLKKTITEDDSKEFISRNLNDTRYMSKLLLGIFEDYLQMAPVKQNGKAKRKVVYSVNGAITSYLRKCWRLAKIRDDGDIHHAVDASLIAMVDDSITQKITRFNKFKETFAFSDGKFINKTTGEVMTKDEMLEYKTEQVQEFGKTLAEPYPNFVNELKIRSTVKYDSFEFSNEEKQELLKLGYSDEEMESAKPVFVSRMKTVKKTGAIHQETMMSTREYEETGNLIKTVPISSLKLKSKIESVKLKDDKYPEFSIENYYRPEDDRLLYLKLKEILHDNPDGLKKGNVHKPRKDGSDGPLVRSVKQYYKASKPVITKNGGALNGSMFRVDVFEKDKKFYLCPVYMSDVYAHKLPNKVIEIGKDWTTIDKSFNFKFSLYQNDLVKITSKKDIVLKKTFDNPKSKKPDSINGKEMLVYYNSTGIAVASIKIQSHDNCYKQESLGVKTLLNMEKYYVDIMGNVYKAPENEKREKI

SEQ ID NO: 49 - protein, 1145 aa, unidentified
  REGION 1..1145: note = Synthetic sequence or unknown origin
MDKLYRIGFDIGVGSVGYAVLENDPVTEDPIKILKLGVRTFSPNEVKDTGASTATARREKRGVRRRARRKKLRMQKLKVLISSQLQIDVNQMQNNLINKDVYELRAKALDEKISNDELAKIILNIAKYRGFKSNRKSSKASGDDGKLLKAIEKNNKFIKDNGYRTWGEAVYKDKNFKITVAGNDFYNVRNHGGDYKNCVQRSDLEEELRLILKKQQEFNNLITDDFIELIILVFSRQRNFDIGPGKQSPYFKENGFADDVGYCTFYEEEQRAPKASFTFEYFNALSKINSLKIGSEFLSLEQKQKLYEEFKIKKELSFAQIRKMFNFDDEKSFNLCRYKTLSKKEREGLNQEEIVNKNKELFFDSEKKQKLASMEHSYDIKKALGYESSYDNRELIDEIAYMLSVYKSEERIDAYLKSNDKGLFTLLNEEQVSKIKELKFDKFASLSLKAMNEIIPYLLEGLRYDLACEKAGFNHSSFKFEKLKYLKGDKIKAEFKDLTSNVVKRAANQTLRILNEIIKEYGSPQFVSIELARELSQLPSERRKSSDLMIANQDKNEQLKERLRSEFNLINPTGRDILTLKLYEEQNSKSMYTGTKIEADRLFEPNYVQIDHIIPYSRCFDDSYNNKVLVIADENQNKGDRTPYEYFGNDEQRWNEFIVRANLLHNAKKTRNLLKKNFSQEESNEFINRNLNDTQYVSKFLLNLFQKYLMLTPSKKFKEIKQIKCVSGSVTSYLRKCWGIKKIREDGDIHHCVDAAIIASVSEGTVQKITTFNKFKEKFFFDKKNERFISKKTGEVMTAEEKENYEKEGIELLRGTLPKLYDGFTQELKIRSKVNYFDFNFSDEDKNALVKLGYSQEEVESLKPVFISRMKNVKTTGAIHKDTMMSTREFDETKCLIKTVTLDNLKIENKVEEEPLKDDKYPEKRIANYYNPKTDRLLYLKLKEMLVEKGKILDKVYKPTKSGQQGPLVRTVKLYEKSSNPVITKHGAGANDKMYRVDVYEKANKFYLCPVYMSDVYNKTLPNKVIIRDKPWAEIDDSYQFKFSLYQNDLIKVTSNKEIVMKKDKNHQNKLSLKPDEIKNNEFFVYYNSTNISTASIEVISYDNCYYKEGLGVTTLKNIEKYYVDIMGKIYKSPKEERKNFNGLY

SEQ ID NO: 50 - protein, 1153 aa, unidentified
  REGION 1..1153: note = Synthetic sequence or unknown origin
MKYRLGLDLGVSSIGSAVLALDEQNNVQDIVDAGVRIFEVSDGAEERRAKRSARKNLIRTKKRLELLAQKLYENQLWVSPNPEGTDNLKSKSPYKIRFDALNEKLENQNYIGRAILHLAKHRGAGFVSAAQEMEEEVLDAGEKSKKKQTAYELLASHLKETNSRTIGEFFWKRILESYEKDENGEHPKVKLRTVRQKSGMVDYALPRYLVKDEFKQIWDKQAEYFPQMQKAGLKQEIYDILFYERPAAPYATGKCIYFRNEDRLLKAHPLSELRRIYEEVNNIRILSDTNKRPLTLEERDKIINELLLQGENAGSKSIKKLLKLSAQQKISIDGDKDKPIKAYLYSRPEFAEIEYIKNLSEAEFAEFIEFLANPVSPDDKNGRLYNEDELIAQLKVILKIDDEKNISDLLIKLPKGRGMLGVSATKIILEKLKENVVSHREITDKLAKEDPRFMAEEEIARQNQGKCFELPYYGEILQTDTQPLPPLVIKNNKSLKPEEIKWGKMANPAVHMILNQIRLVVNEIVRIYGRPYDIHVELGRDVGMSTDKQKQFETAQKANEKLNEEAKKYLQEHHIYVTGQNILKYKLAKEQGWKDAYNPTQAISRNFMGFEIEHIIPQARGGTDTYNNLCLVNRSDNEAKKDDFAYDYFVKTKSPEVLREILKNARANTPNKAWRFEADAREQYEDEGDKEETTRHMTDTRYVSKLTARYLRAIVDCSDVNEVSQNRILAVKGGQTSELRWRWNLQGLEYDLMGIKVPRFLYWLNNDTGEVSYERKNEDGWIPEKNPEWSVKPRIDHRHHAMDAITVACTTRALVKRLSNEEKLRYMPTPLPMTSVASVADFRRRVLEVLREVKISHKPDHNKLGQFHEETGKVKLCKNPDNPNNLITVYSRKIFKVVKTYNDLDKLLIPDSVKDSWYEGIAENRAKQAKLVADFKQYWNVAEQILQEENEKDVADGKKERRITDGLIAAKTFHILLDKKLWKGDKIKCYENVSSFVFVKKHNLVYKSGNNHCVDFYEKDGKVGWEVIKRFDVNQADFIPQWKKDGGKLIWSVQQRDMLELDTPVEWASYTDKPRCLAKVKKFSDGRVTIDYMTDARMTSPKDKSLKYMFVHSLEDRGLSYFINHKTRKIELTPFGKVKKKHKVLWNGTKTAA

SEQ ID NO: 51 - protein, 1157 aa, unidentified
  REGION 1..1157: note = Synthetic sequence or unknown origin
MNYILGLDVGIGSIGWAVINLDKYRVEDIGVRIFESGENAKSKSSYCQERRMARGIRRLTRRRSHRKDRLKSHLEIIGLTTKNDIKEYYENGNCNIISSRVRAIDEKISPEELAACLIHICNNRGYNDFYSLNDEDATKEEKSEYEALNKIESLMCSNNYRTVAEMILKDDTFNGDGKCRKYHNSEFSDEINLIKRNRLEEEVNLILEKQREYYTCLNDDAIKKIKDIIFSQRDFEDGPGDKDDKFRKYKGFLDTLGKCRFYPEEKRGERFTAIADVYALVNVLSQYRYYDKNGELCFNSDIAKALVSYALENGNMTKKDLKTITKKFGVIFDDSGTEDTPITKCFRYIKGIKPVFDEFGCDWNELISDYTDVENNLLNRIGDKLSKYITPKRRIKKLEEFNFDSKMIEKLSKMKFSGTSNVSYKYMKDAIEAFLGGDIYGNYQASFNKENTYTIKEEDKPYKLPPFKSEDDCEFFKNPVVFRAINETRKIINAVVDKYGYPCAVNIETADEVNKSFADRDKTGRMNKANEAENDRIRTEISNLLKIDENSVRPVQIERYKLWEVQEHKCLYSGKEIADPIPMLEDNDHLYEVDHIIPFSIILDNTINNKALVYVSENQRKGQRTPLMYMTPEQAEGYKSRVNAMMKSKKCSKKKYQYLMLENLDNNNLLSEWKSRNLNDTRYISKYLVNYIRDNLRFNPNNEFADDFSIKTSNRVFAVKSKFTSQFRKQWLNSKTWGRKDKEELKKITYLDHAADAIVIANCRPEFVIIAGEKLKLYNIWKQAGKCITDEYTRSLNNCVDTLVKYYGMNRNFVTKILKNPSYKVSPIIPHIADETDNRLRDFNTHRILFNAPDDTNEQITETFVSHNRHLYADDPEFAESLKMPVISYKPERKYTGEITTENPISVKEIDGEEVQLSRVKITKITPKHLSRIRTDDTDLRYSLESALNGKGDTYTIEKYLKDNKLEYFTTLKGRRINKVTVKNPNPDPKYLKKEISENNYTYLDNTSYYCLEIYKTKDGNNNMLGIAMSDLVKKNKKLYLKSSFKYPKDYGEHIMYLFKGDYLRITDKKGQIKFEGYYLSSNGIKDKSIYVVKDNFDKIFKKDDDNKQKARGKTINLAQRDKCIKLNVDILGKISGYNNGEGISCGEPLSLLKEND

SEQ ID NO: 52 - protein, 1157 aa, unidentified
  REGION 1..1157: note = Synthetic sequence or unknown origin
MEEIKQLSKNEEIPKPTDLNYRIGLDIGIASVGWAVLENDDDDEPCRIIDLGVRIFKKAEQDNGDPLALPRREARSARRRLRRRRDRVLRIKKLFEAEGLINIDEFEARYEKAGLTDVYRLRYEGLDRKLSNDELAQVLLHIAKHRGYKSNSKAEETANSEDEAKQKEAGEVKKSISDNKKLMMEKGYRTVGEMLYLDEKFKIDCNWNAEGYVFCPRNKAGEYKVIILRDMLVEEVKAIFDAQRKYGNIAATVELEKKYLDIMLSQRSYDQGPAAPSRYAIDGYEFGMCTFERKNGHRRAPKAAYTSELFVALLNINHTKIRDKDGNLRTFSDEERKKLIKLLHVQQEVKYSSARKLLGLPDDETFYNLTYSKGKNKNCEDAVFIKMKNYHKIRVAMNEECTDKLLDDERADKYDTIAYFLTKYKNDDSRLKELRALGIGGNECANLLKLSFTKAQNLSLVAMKKIIPFLLDGKVYSEACKLAGYGEYEEDKNTGKLKLLKGKEITEYVNEISNPVVRRAVSQTIKVLNAIIIEYGSPQAVNIELSRQMAKNKNERDKIDNDMKKRSAENSKILNEIMEYKANPTGKDVVKYRLWKEQKEVCLYTGKKISADELFAGDGEYDIDHILPYSKTFDDSYHNKVLVKAEANREKGNRTPYEYLISKGGEKAWEEFSVRVEHCIKDYKKKQKLSKKCITEDDTKEFKRRNLQDTQYATTFIYNLIRQNLYLKPYQNLTNKKVQQVVALNGSITSYLSKRWGLESKDRKIDTHHAQDAVVIACTTQGRINKISNYFMCREAELSGNHVISRKKYDENSGEEFPKPWKYFKKELDVRMSRYHGEAGAIDYVTTPREYLLLDKDVRKHIGYPDWMFVKGRPGRRGVLDGIFVSRMPSRKVSGKAHEDTIRSAKYYKDGGCGVNKGYVVFKKTIQGIKLDENDEIKDFFNPDSDRLLYNALVNRLKQHNNNPKEAFAEPFYKPKSDGTPGPIVKKVKVFEKMTIGVSLEKAEGYAGNISGSMIRVDFYYVNGKYYFVPVYVSDVVNHQLPRKRAVKEKVSSEWEEVDDKDFIFSIYKNDLVYIENDKLPLTHKNNSDYPLPDAKNGVFMYFCDADISSLAIRCESNDGSFGFRSSIVTVKKFCKCQVDVLGNISFVHKEKRMTFN

SEQ ID NO: 53 - protein, 1166 aa, unidentified
  REGION 1..1166: note = Synthetic sequence or unknown origin
MEEIRQLNRKLEETKPIDLNYRIGLDIGITSVGWAVLENKNDEPFRIIDLGVRIFKEAEQSNGDPLALPRRKARSARRRTRRRRFRLERIKKLFQTEGLIDIKEFEARYEKAGLPDVYRLRYEGLDRKLTDDELAQILLHIAKHRGFKSNSKAEETENENDDTKKKEAGAIKDSISNNKKIMEEKGYRTVGEMLYLDEKFKIDSNCNTMGYVFCPRNKQGDYKVIMLRDMLVDEVHAIFEAQRNLDNTSASDELEKKYLDIMLSQRSFDQGPGAPSQYAIDGFDFGTCTLEKANGEKRAPKAAYTSELFIALQKINNTRIVDKDGNIRNFSDEERWNIIRLIHKQQEVKYSSIRNALCLSDDEKFYNLTYSKKKDSEQSVFIKMVNYHSIRKALKAECSGELLDDKHAELYDNIAYYLTKYKNDDSRLKELKNLGIGEEKCNNLINLSCTKTQNLSFVAMKKIIPFLLEGKVYSEACKMAGYNNSNEDSCADRLTLLKGEKIKDAINEISNPVVRRAVSQTIKVLNAIILEYGSPQAINIELSREMAKNRIERDKIDKDIKNRNNENQKILDEIREFKPIPSGKDIVKYRLWKEQKEICLYTGKKISAEELFASDGGYDIDHILPYSKTFDDSYRNKVLVRSEANKNKGNRTPYEYLISQGGEKAWEEFTIRIEHNIKDYKKRQKLLKKHVTDEETNEFKRRNLQDTQYATTFIYNLIRQNLYLKPYQNLTGKKKQQVMALNGAVTHYLSKRWGFESKDRRIDTHHAQDAVVIACTTQGMINTISNYSKFRELELNKINKSRSIKVDELSENEFITREQYDKNFGVEFPLPWDNFKEELDIRMSRYHGAGDEKFLETSPREYIQSHSDVSKRLDYPKWMFVKGRPGRRGVLDGIFVSRMPNHKVTGQAHEETIRSAKYYKDGGCGVDKGYIVYKTALTNLKLDKNNEIANYFNPESDKLLYNALVEQLKEYGNDSKKAFEKNFYKPKADGSKGPVVKKVKVFEKKTTGVYLKKVNGFGYNDSMIRADIYYIDGKYYFVPVYVSDTVKNSLPNQRAAKDKNSCDWEVVSDDNFLFSLYKNDLLFMKNNKLPLKSIDEYKYLVPDSSKGVFMYFCGADVSGLAFKCESNDKTFNFRSSITTIEQLCKCQVDVLGNISFVNKEKRMPFN

SEQ ID NO: 54 - protein, 1183 aa, unidentified
  REGION 1..1183: note = Synthetic sequence or unknown origin
MANYRWGIDLGTSSIGVAVYETDNNGKIISLKHLDSYIFGEPVAPKEMVTLNTARRSARLIRRQVERKAARLKKMSYIAKSLGVTPEVLRATPEDVVALRAKAVREEISILQLIKVLSHIVKNRGYKGTLSADDKGTVGKKLSQTAQALTGGKTLGELLYERKTQANGQPWRKVEEDGTFIYRQLVEDEFARIWDTQAKFHPELNGSYAVWGDKMFPDFPGKTEISLKDAFHSAMFYQRPIKWELETVGNCEIYPAEKRAAAAQIAYQHYRMAKTLADLRVRNKNTRESVPLTLAQKSQLFEFLDAHTAEYSPETKAVPFTVLYKVLGLPEGCTFTLDRTYHARGGLKGNTTLYAFEKAGVLNEWSNLTDTAQELVLEFFANVSNLSDIEDNSDAYIKERVPELTKNLKPTPQDCEACCRFILLLKARGVLGELVLEQGRSSYSIKALKMLTERIMQGEQEADILADIEAQKTHPQGKFRSTETILKEQAINDPVVIKALNEFHRVVQYLLYRNWKPKEIIIELSRDMKKSLSRRQFLEAQNKVQADERNAAKKELVEEFGVLPTPNNIERYLLWKEQAGMSPYSDNGSTKISDAEAFDSRETQVDHIIPQQGEIGGPNTFGNKVLVFTKENHKKSNQLPYQYDNGKFKEEIDAYKAWLVDNNLLGKKRSNRKKVEPFYPASNLIKFVERLRILKEKEWKWSQRDNEFWLTPKGRNIEDKINNLLKTPEELKQDFVDRQNQETAWIGKVVLGWCKDICFAQPTFGTLTAYLRRQLQFDRIIPQIRFSEGKPLYDTDKKMLDSNKLKEILENVPYDKLSAIKPEFEKYCADFFKPCDTTKDYAKALARFQTEIYGSLDKRCDHRHHAVDAAVIGLCSVSIVQKAQNFYKKHNTLYIKAYDERGNRDKKHDVEGFLLENDTIPNLARIRKEVQARLTNYVVWHKPDHFPSGALFDQTAYNVLPKDGEKRFVKRAPLISFLKSNEKKTLENLEKLLFCDTVKNEIITQFKERLAQGMTQEEALCGKKDDPSDGISYRGNKVKQVKYMYLTGRGIRVFDENADKEISSKDKIGTQHKKAYQNGGYACMDFDAKTGKRLALVPLWKYGKQKQVPPNVVRVFIGDILFNKGVKQYFLVKQFSARDGLGLLLTTEVNGARLFTSNLKNYSVVSTRQDIAKLKDNEHTTSD

SEQ ID NO: 55 - protein, 1335 aa, unidentified
  REGION 1..1335: note = Synthetic sequence or unknown origin
MDKFYLGMDIGTNSVGMACTDEEYSLLRANGKDCWAVRLFDESETAVKRRNFRTARRRIVRRRERIKFLQGVFAPFIDDETFFIRLNDSQYYPEDKNGLLNGNKNNLFADKGYTDKDFHKEYPTIFHLRKALMTQPIEDLRLYYLAIHHIIKYRGHFLFEGGMADIRDITKLIENLNAVCGDLFDEDAPNFDVNKSHEAKEILLTYGKDKQKRLESLFGVTSNTGKEIIKGICGYTIKPEKLFAGNYQEEKSFSFKDLTDETFEAMRPTYSDDFSLLESIRAIYNFVTFEKLLEGKEDISSAMIDLYEKHKADLRLLKDFVLNNATREEYNSLFKVIGKENNYAKYVGFTKKGGDKKKATPAQYDEFLPYLKKFITSLTQVTDEETKEKILAEIEAKTFLPKILHADNGLFPHQVNEDELNKILANMAKIHPETECIKDKIKKIFLYRIPYFVGPLAGANGWAVRKAEGKITPWNFDEIIDKAQSNENFMRRMTNMCSYLYGEEVLPKASIIYQKYNVLNQINKLKINDKPINVALKQDIFNQLFLTKKKVTDNAIKDLLVRRGIISEEEKKTIIISGKDGQLNATMSSYLQLKDILGDFVDEDIQKEDSVCEKIILWHTLNTDKNIVVDLIERNFGKIQIIKDNLKQLKGLVFKDFGRLSKRFLTEMKGVDKTTGEFVSILDVLYETNENLNQILFDERYNFGDVIKEENGEKQSEIKYEDIEKLYVSPAVRRGIWQSLKMADEYIQAIGKTPDKIFIEVTREEGVKGDAGRKSSRQKQLLEKYKTIENIELLTESLTNESDLRLRQERLYLYYRQLGRCMYSGEQIDLDSLNTNQYDVDHILPRTYIKDDSLDNKVLVKRSCNATKTDRYPIPNEILGKDVKKHWELLHKKDLISDTTYKRLTRTKPLDEDDYNDFINRQKTITDQTAKAVAELLAQKYPDTKIVYSKAKNVSDFKSKAGLVKCRETNDLHHAKDAYLNIVVGNVYDTCFSTPMSMFRQDGDKWRTYNLKTLFFRNINGAWTSDDNKTLVKVKETFKKQRSINVTRYTYCGKGEFYNQTVYPHDDTGVNAPRKSGSPLKDCAKYGGYKSQNTAYFAVVESEGKKGKIIKTIEAVPVLVTYNLKNNPNAVQEYFESYLTNPKILVPKLKIKQLIKYNGMPCYIAGTTGIQIILHNGVQMFTDGKTDEYINALLKVAEMDKNQTCDKDAETYLIKTNRFKEVKLEVNKQNNIALYDEFINRLSSGLYGKMGSAISYLTNLQSGREIFINLTTLNQSLALLQTLKFFKCNAEMADLSLIGGASHAGKIYISRDITKAEVVLVHQSPCGLTLREQKI

SEQ ID NO: 56 - protein, 1204 aa, unidentified
  REGION 1..1204: note = Synthetic sequence or unknown origin
MERILGIDTGTNSLGWAIVDKEEGKSTLIAKGTNIFTEGVKIEKGIESSKAAERTKYRSVRKHYWRRKIRKIRLLTILSENHLCPPLDKSILRQWRLKKLYPDNELFMEWQRTEDKAQVNPYKFRYICLTQKLDMSDIVQRYMLGRALYHLNQRRGFLSNRKEATRESEGALKEGISALSEEMKEAGCEYLGEYFYQLYQKGEKIRNHYTARKEHYLKEYRAICEKQGLEAALVKKLEHAIFDQRPLKSQKGQVGTCTFEKGKSRCPSSHPLYEDFRMYSFLNNIKVQVNTLYENCERGLTNEEKARIIPLFKRKSKRTFLFEDIAKKLAGKNNYCYYKSNEDKPYKFNYQMDTLVSGSIVNAQLEEIFGEDWLTCVCEVYTQANNKTRFQIMNDIWHTLFFYDDDEKLKSFAVNRLQLDDEQADKFSKISMPNDYAALSLKAIRKILPYMRDYGLIYSEAVFLANLVEIMSRYIWSVKEMREAAIENVIEVMHSYDKNNIDGMTLEQCVKAFLHERYNVSDVDLRKLYHPSMMDLYPRQRPRENGVYQLGSPRISSVKNPMAMRSLFRLRKIVNLLLKERKITPDTKIHIEFSRDLNDANRRWAIQTWQRENEKDREKCRKEIEKYIANPTDTDILKYQLWEEQNHKCLYTGEEIRLTDFLGNNPRYDIEHTIPRSAGGDSTKANLTLCSCRYNRDVKKTKLPTQLSEHDEILERIADWKERYEDLDRQIRKISTKGISSKEEKDKIIKRRHLLSLQRDYWRGKYQRFTMKEVPEGFSRRQGTDISVISRYARMYLKSVFKQVYIVKGVATSDFRKIWGIQEEYTKKERVNHVHHCIDAITIACIDKSEYDKLAQFYHQSDEYKFGRGEKPQFEKPWPSFVSDIKQIQDELLIAHYTKDNMSKQAKRYVRDSHGDKVLTQGDVARSSLHNETYYGAINVDGVVKYVVRKSLDGLDEKDVKNIVDGEVRAKVEHAIRLHGSLKKALENSIWMNEEKQIPIKKVRIFTGSVTRPIHIRQQRDLSKHDYKRQYHVQNDRNYMMAIYVGQDNKGKEKREFELVNNITAANFYRKSNDKVPTNNQLLPIYSKSGYELKYRLKIGTMVLLYENSPEEVWELDRKNLQKRLYKVTGMSSMIIQGKFEYGTIEMVHHQNAKPSSEIKKINGEYKSDEDFRPGIKMLHSQIKVLVQGVDFEINDLGEISRLI

SEQ ID NO: 57 - protein, 1207 aa, unidentified
  REGION 1..1207: note = Synthetic sequence or unknown origin
MEKILGLDLGTNSIGWAVIERKDDNSCALLDKGVHIFQDGVAHDKSGEKPAVQERTAARASRRHYFRRRLRKIELLKVLIKNGFCPVLSDEDLMRWKSEKVYPLDEEFIKWQRTETESDKNPYRDRFRAVTERLNLSDTRDRYVLGRALYHLNQRRGFLSNRKDAAEDQKDGTVKESITKLTADMSAAGCRYLGEYFYKLFNEKKKIRTHYTARKEHYREEFNAICEKQQLDADLKKALERAIFYQRPLKSQKGNVGKCSFEKRKPRCPLSHPRYEEFRMLQFINSVRIKGPEDEAFRPLNHDEAEAITPLFFRKSKADFDFEEIAKRLAGKGNYGYKDDRAAHPYLFNYKMTASVSGCPVTASIIQALGMEPNRNWAEDLCALYTKGEGKDQEQILNDIWHALYSFDDEKKLTEWLRISLQLGDDEAKNLAKARIPQGYASLSLKAINKILPWLRKGLIYSDAVFYANLDSVLPASVTGDATKLDEVYDNMSVCLRDFDQNPLNRTSNKAAVISDYLITVAEGVKVDKLYHPSMIEAYPAAQRDNHGRIRLGSPRLNSFKNPMAMRALFRLRALVNALLDEKVIDPDTKINIEFARELNDSNTRKAIADWNKEQEDLRKQYREEIRNLFSGNYEPTEDDLLKYRLYEEQKHICLYTGKQISPTMFLGNATEFDIEHTVPRSKGGDDSLANKTLCDSKFNREVKKTKLPSELPEHETILQRIEEWKSIIEDLDKRLSAQRRKCKAASTKDQKDAALRTIHYLRMKRNYWKGKYDRFVMKDVPEGFSNRQGVDIGIIGKYARLYLKTVFQKTYVVKGATTSDFRKAWGLQNEYAKKERVNHAHHCIDAITIACIGKGEYERWAQYMRQMDSHLFWNDPKPRFEKPWATFTEDVLAVPSSLIVSHYTPDNLPKLSKKKVRIRGIIQKNQEGKLMYTQGDTARALLHKDTFYGAIQSNGDIRYVVRKAIDALKDSDIQNIVDEAVREKVRAAVKQHGNLKKAVAETIWMNEEKQIPIKKVRVFTPTITNPIPLKAHRDLSEKEYKRQYYVSNDSNYCMALYGDDKPSFKLFSMLSAVNHFNGKPEEWIGSEDKQGRALRCVLKPGTMVLFYENTPEELHDCSQTELSKRLYKVTGLSPMTIRQKYHFGRITLKHHQEAKRASELTEKNGLWKEVEAYRPVIGLNNNQAKFIVEGKDFTLTVTGRIILRKK

SEQ ID NO: 58 - protein, 1210 aa, unidentified
  REGION 1..1210: note = Synthetic sequence or unknown origin
MKKRILGIDTGTNSLGWAVVDKNDKGEYSLVKKGSLIFQEGVKIEKGIESSKASDRTLHRALRKQYFRRRLRKIEILKVLIDFRWCPPLSSDALHKWHTQKIYPMDDAFISWQRTNDNYEENPYYYRHVCLHEKLDLKDKSSCYILGRAMYHLAQRRGFLSNRLDQGNEDESGKVSEGISSLSKSMEKTGCIYLGDFFYKIYKEKGNTERIRNRYTDREEHYKKEFYAICEKQNLSEEQISRLEKALYFQRPLKSQRKGIGKCTFEPSKSRVSDSHPSFELFRMLSFVNNIKVKGPHDIESRQLTTGEFEKIKPLFFRKSKSQFDFEDIAKTIAGKNNYQYIKESDDKSYKFNYRMTQGVSGCPTIANLKSIFGENYAYAIAERYILSDGKSQEQMVNDVWNVLFSFSDKKKVEQWGKEKLQLTDEEAEKFSKIRLTHSYTSISLAAIRKILPWLERGLIYSHAVLMAKVPDIVGTETWKKRGEEITKELMSLIANFNPRDISMQGTLDYCIKDILKDMCELKPGMVDLLYHPSMIDTYPDAKKNAQGIYQLGSPKTNAVRNPMAMRSLHQLRKVINALLLEGTINNETEVHIEYARELNDANKRKALAQWNKDRETIRKKYYDDIRRLYKEECGKDIEPTDDDITKFQLWTEQKRICLYTGKSIGIQDFIGPNPSCDIEHTIPRSVGGDSTLENMTLCFSFFNRDIKKAKLPTQLSNYDEIMIRLEDWRKTIEKLQKDVDRVKTHSGMDKNTKDRLIQKRHRLKIELKYWQGKYKRFQMEEVPEGFARRQGVGIGLVGKYAGLYLKSLFHKADDRTKSNVRVVKGTTTAEYRKMWGIQNEYEKKSRDNHVHHCIDAITIACIEPGEYNATAKYYQQLEEYERENAPKPTFPKPWPTFTEDIKAIADEMLVVHSTPDNMPKHARKYVLTSNGKKLAKGDVARGSLHNDKYYGAIEHDGEIRYVLRKSLQELKEGDVENIVDDSVREIIKKAIAEKGFKRAMEEDVFMNKEKGIKIKKVRCFTPTVTDPLHIRTHRDVSHKSYKQQFHVTLDGNYCMAIYEGIFKGKTKRSYEIINMLDAASYYKESADLTKLYPIAPEEKSGLKYRCLVRTGTQIILLQTDDEDINLMDKKELTKRMYFVAVMQKDGRIVLRYNQEAREATILKKERKAGAYKIGESYRSEISLSLSDFHALVEGADFKINVLGEITLLK

SEQ ID NO: 59 - protein, 1214 aa, unidentified
  REGION 1..1214: note = Synthetic sequence or unknown origin
MGKILGLDVGIGSLGWAVIDEDQHRIVDFGVRIFDSGEEGASKAADRASQVRRRYRSTKRLNKRRKQRKLRLKQFIEEQGLISVEDINSAYRTNGFNPDVWKLRAEGLERKLEPIELASVLINLSNYRGYQDFYEDADEEDSGKLSEAKNKINTIYKEKGKLYKTIGEMIYREECFRSGPDGMLTIRNKARRENGKKVTDYKYLIDRKYLSEELKTLLKCQREFGYEQLTDDVIDAFSGIIFTQRDFEDGPGPDKNKDKMRRDAMMAALKGNQTYSGFDELVGNCPFYPDEKRGHKNSQLYDMYVIVNSLSQFTFFDGKGNEINCPESMVLEIRQQLFEKAGVLTKKDIETLCKANGVTIKIPTELGKKKNLVKAEFIKFLSNSDIFPVEFIQRFKEETFDDENALSAKIGYILAKFATPRRRKEELQKVLTQEEYELLKDGDKIKTEKTGGGASVSFKYMKEAVEAYFEGVKYGDFQAEFNKKHPQEEKRVFLSPEGKVLPITDSDMVRNPVVYRSLNETRKIVNVVRAKYKDVKTINIEVAKDVGKSFEQRKETLKYQRENEENNEKLRMQLIEKLAAENMQVMLADKLIERFTLWQAQKGKCMYSGKDISFAELVSTTVVQVDHIIPQSIVLDETLNNKVLVYTEENQRKKNKLPLEYMAEDQATEFKNRVNNLFRTGNISRTKKEYLLLPFLDDETVRGFVDRNINDTRTISKFIANYLRIAFQDKVKVQVIKGAITSKFRKRWLGSKTKRYGYVSSIYGLEKKTRDLHYYHHAIDAAIVANLTHPYIELAQDYVKFDAMMKDIDYLQRKGNGSTALKLQEELIQEQAKTVDKMFKVYGFNREYTKELLASGYVPSICEDLRKEVEIRVPLEIEFDAKEYADMEKAFYELRQLLNAVRYNFKDVDYENRSDVVDPDMLEEINARLPIVRPDVACMKSNAQLVFVDKPVDENATAEEVSKELTSFVKKLEQRSIMDYIKSIRMLSEEEYAERVHEYYSDKQFADEIELPYVSFKIDRKFRGSMVASDNPVSLGKAGYKTFKELEEDMKNNLKCPYYVRFNKGIGETGNFTIYDARSYYCMEVYTDEKGSYQIRGIRYVDVRNDHKSGKLVLLKPLPEGCTHHVYLFKNEYIKAYKNGKLRNNGFGAYRGVENINESTGKIRLFSNVNLSGRNTKIRLDGEIKKIEISALGHIMGEQKCGDQSLFIAENDLT

SEQ ID NO: 60 - protein, 1260 aa, unidentified
  REGION 1..1260: note = Synthetic sequence or unknown origin
MKRLGIDLGTNSLGWAVFEDEAMREAPVGSEAPNPIACGVVVFPEGLERDKSDNLKSPAAERRAKRAARRLIFRRRLRKFHMLRALMELGMCPLSEEGFRAWKEEGRYPLKDAAFMDWLKSTPEHNPYADRAAAAEGKVDALTLGRALYHLVQRRGFRSSRKERVQELLAEVEASEAKGKKAVRKTKANDELGVVKQAIKDLTAALEGEKLTLGQYFFRRFAAYATALKEGRMAEAGTLACIRGQRTGRVEHYEKEFDRIAEVQGLAPETRDRLRRILFFQRPLRIQRHLVGWCTLEKGRPYRTVDAKGNVMEARGHKYRRCLEGHPDYERFRALAFLNNLRVSVAPEQEGESERLRHGEGRTLTANEREAFLTACVRKTSWKVEDALAKVFGKKTHVRSNHRPGDEAPMMPMRAALEALDIAPEQWERALNALYAFDDADKLIAWAQKPVAEHGLGLETAKARRFACIDAPQERAAYSLHAIRKILPFLEKGFMLRKAIFCAKLPDLVPDYAAHEAELLEGLSACEEAWAEERVVAQADPLHRRKPRPLESGHYRDYLRERWGVNAVAFAQLYVDTAQPDKENPVLPPVDLNAIRNPLVNRALTVLRRLVNTLRREGTIDADTHIFIELARNVNNANACRAIERWQKQRQEARERARQFLRDHGANANDEALILKHILWEEQERKSVYTGQPIPQEAITSADYEIEHTIPRSRSGTSELWNLTLCERHYNVDIKGGRLPMECPNAEREWRDPAHPDAPYPALAQSAPLVAWEDKRKELESKLSKKPMRGNDPAAYAKRRQDWLLTKLERDYWAKKVSTFHITAEEVEAQGFIPRQLVDTGIMTKYAVRFLKTRYDKVFARNGAATATARKLWGIQQESEEKSRANHIHHAVDACVIAALDQTTFTALCTQLKQGDTVDTWARTLPPPIPDFASRVHQATEAILIRHLPANRQVRPIGKKSTRLPEEVLHRLQKEGRTAPRAGKSDAVRGSLHNDTLYGRIRVDGEEKTVLRKGLKETFEGKLKKEALTAKDIANALQDMVDKGLREALAKQIAAYLQAGLSAKELPDKPFFAPNGLPVKSVRMLCYKPKNPDPIRVPHPELPPTYGSGSDALYLSVRENSKTGKLESSYVTLLQTVKDPASVVFQNEKFRIYPSQLALAYEHSPEELRTLTPQRLSKRLYVVTQVEYTFFIYLNFHQEARKQKLLKEERKLAGLSETTGEIDYIHGTPRLHLSQKAFLEHLLFENVHFRLTLDGRLEWL

SEQ ID NO: 61 - protein, 1311 aa, unidentified
  REGION 1..1311: note = Synthetic sequence or unknown origin
MKENEEYNIGLDIGTASVGWCVTDLNNNVLKIKGKNMWGSRIFEEAQTAAERRNFRSARRRLTRRKERINILQDLMREDIEKEYSNFLPRLKETSLKYEDKIFSNSKYNLFSDNNRHEISYYEEFPTIYHLRNKLIKEENKVDIRLVYLAIHHIIKYRGNFLYDGDFSNDTSKVDDNLEIILEFLNQNYQIELKSKDDLKNILLSKNLSKAQKKDELMACFNFVSSDKTIITNIINAILGYSFEINKIFDCDLEKSKIKFSNEIDNEEEIENSLESNIDIYYALKDLYSWYILQDIMSNCNYISESFMKRYEKFKEDLKLLKKIYKEYFPNQYDEMFKVKGKNNFVNYIGKNKGEKFGKCDPEDFFKMLKSKIKELPDTCTYKEQIELDLQNDDFLRKLNIIDNGAIPYQLHKNELSIIIKNQSKYYNTLKENGEKIISLLEFRIPYYVGPLANDKFNKWNWVVRNNENEKIRPWNFSEIINEEETAEKFINRMTNKCTYLLNEKVMPKESLLYSKFCVLNELNNIRINEKHIPRDLKKKIVDKLFKQNKKVTIDMFKELCKIEGLPECDIIGIQDGKNFMSNMSSYMDMSKIFGKVDENNYDMCETLIYWITIFEDKKILKKKIKATYSTITEEQLNKLLKLKYSGWSRLSKKLLVGLKSNDYETIMDKLEKTSMNFMQIINNKNFGFDKKINDLAPVIDKNITYKDVSEIPTSPANKRGIWQAICVVKEITKVMNAEPKNIFIEFARSEEFNKNMSQKRAKKLLKIYDNIQDELATLKEYDSNVYEKLKENKSNKDFSERMQLYFMQLGKCLYSGEPLNIEDLNLYEVDHILPQAYIKDDSIDNKALVKRIENQTKKDNLLLSDKIINNMSGYWKKLLDLGLITKEKYLRLTKRKIFENDYEQENFVKRQLVETRQITKYVTNLLKNSYTNTDIFTIRAELTHAFREEFGIYKNRNVNNYHHAHDAYIISIIGNVMNTYIRNNEEFKYGDFVKKYLKENKNKAEKNGMIIGSIKKNIDIGNIKKVFYYKDCFISRMLIEGTGAFYDQTLYSPKINKNKLISLKDDKDSTKYGGYSGEKKAYFSILEYINENGLKEYKLLGIPIKVAYDIKAKKYSEEEYIKKVFFKNNDITELKVIKKKVLKNQQYLDENKEVMRFCSDSEIRVDKELVLNYKMNELIYLMNMKENQLKDNEKDLLNNNFEYMFDYLLEKIKTEYKVFSSIYKKLLDKKEQYMLLENEDKKCVINGLVDLMKNGQGNLKKVGLTEREGRKSKQNFDTKRLTNMIFIDKSVTGIYERRINIYGMENSSSK

SEQ ID NO: 62 - protein, 1315 aa, unidentified
  REGION 1..1315: note = Synthetic sequence or unknown origin
METQNKYNIGLDIGVGSVGWCVTDENGKMLKKGNRNLWGSRIFNEANPAQQTRIFRGARRRLDRRKERIRFLQSMLQEDIEKEYPNFFPMLRESSLDFEDKMTAMSISNKKYNLFSDTTMTDTKYYKEFPTIYHLRKYLVDTDEKVDIRLVYLAIHHILKYRGNFLYEGDFSNNAQEIEEKLDIICDFLEDRYEITLNCNKQEIIDIFQEKNIAKTEKKEKLMKCFNFEKSEKPIIENIMKSFLGLQFDLNKIFEIEIEKSKMSFAKELEDEVETEIKKQLQDNLPIYEAMNDIYSWVTLQDILKGKQYISEAFIEKYNKYQEDLKLLKRVYKEYFPKQYSEMFRKYNEKNKTNYVAYNKKNNGKTNKKCKPEEFLAILKKKIDELPDACVEKEKIKKEIEDNNFLQKLNVTENGAIPHQLHQKELNVILEHQSKYYKTIQENKENIDKLFCFRIPYYVGPLAKKEGKWSWIVRKEEGNIRPWNFGNIVDVDKTAEAFIKRMTNKCSYLPQEDVIPKQSLLYAKYCVLNELNNIRVNEKHIAKDMKRKIIEKLFQERKKVTKKALKDFYKKEGFMVERIDGLQDNENFMSNMESYIDMTKILGTVSEDNYEMCEKIIEWITIFEDKKILKTKVKKEYPELTNEQITKLAKLNYTGWSKLSKHFLTGLKAQDGETIMDKLENTTMNLMQIINSDKFNYAEQIEKAIPKKTGKITYEDVAEIPTSPANKRGIWQTICVVNELVKVMKGEPENIYIEFARSEDVKKQRKDSRKDQLLKKYKEIEAQATELKEYDPKVYKQLKADQNDKNLTEKMYLYYIQNGKCLYSRRPLNLDELDKYEVDHILPQSYIKDDGIENKALVIKEQNQRKKDSLLLSDTIINNQIEWWKDLLDKGLIGTGKYYRLIRRKMLETDYDKEKFVQRQLVETRQITKYVTNLLKSSYEDTEIYAIRAELTHNFREDYKIYKNRNVNNYHHAHDAYILSTIGNIIAKHWKVKENFQYGEYVKKYLQDEKSKYEKNGMIMGMIRKNVDIAEVKKAMEYKDCYISRKLEEGTGPFYKQTLYSPKEKPVISLKQGKAPQKYGGYSGENKAYLCIYGYQDKKGNQQYKLIGIPIQVSYQIKAGKETLENYIIETEMKDKQYSQLKIIKDKILINQEYLDENNEPMRFCSDSEIRTNKELQVNNKITEFIYLMNLDKKKLSDEQIEILENGYTDTFEYLLEKLKQEYKSQRTVYEKVLKKKDEFEKLESDSKKIVINETINLMEEGIGNFKTIELSTMLGRKNGKSFETDSLLQMTFIDKSITGIYERRFKINWDGEQL

SEQ ID NO: 63 - protein, 1317 aa, unidentified
  REGION 1..1317: note = Synthetic sequence or unknown origin
MKSQKDYYIGLDVGTDSVGWAVTDTDYNILKFKGNAQWGIRLLDESNTAEERRAFRSSRRRTQRNKFRVQCLELLFNKEISKKDVAFYQRLHDSNLWEEDKNVAGKYSLFNDEGFTDKDYYKLYPTIYHLRKKLVESQAPVDIRLLFLAVSHIVKNRGHFLFDSDSLGNNSVPSFNEVWRELAVYIADEFNVELECKDICVIGDILKNKNLSITTKKTMLLNEFSVAKKEEPANSIITLLAGGTANSADLFSNEELKNSEASKITFSSGYDEKVTVYESVFGDGFELLEKMKAVYDWAILADILNNQKYISFAKCEIYDKHKKDLKMLKEYVNAYIPEKYNLIFNENKSGTFNYLAYSGYSKKNPVEKKCQQQDFLDFLKKQLPKDAKNKKYEQMYSEIALGTFMPKIISKDNAVIPMQVNKAELMVILENASNYFPFLNEKDLDGKSVKDKILDVFSFRIPYYVGPLNKHSDKAWLERTNEKIFPWNFGNVVNVDKSAEKFIENLTSKCTYILKADVLPKNSLLYSKFAVLNELNNLKIDGEKIPVDLKQKIFIELFEKNNRVTSARLKKYLKSYGVEGEITGIDGDFKNSLKSYRDLKGFELTESEKEEVIKAITIFGDDKGLLKRRLNTLFGEKLSKEDIAKISKLKYSGWGRLSKEFLNEIQGACAETGEVNSVIGFMWETNNNLMQLLSNEYGFIKAIDEANGEMQFTSLKKEIEALYVSPKVKRPIYQAMKIVEELVKINGCTPKKIFVEVARGAEEKKHTVSRKNRLLELYKSCKKDNEELYNAIADTDEDEFRRDALYLYYTQFGKCMYTGKSIPLSEIYNKHLYDIDHIFPQSKLKDDSLDNRVLVTKKSNEDKGNIYPIAQSIREERAAFWKMLLDKGLISLKKYERLVRNSPLTDDELTSFINRQLVETRQSTKAISQLLSKRYESEIVYVKAGLVSDFRKKYDFIKCREINDFHHAKDAYLNIVVGNVYNTRFNHNRLAFISKLQSGEVSLNGMFNYDTTGAWVAFGTNKSIDTVKNTMSKNNIRFTRYAFKQKGGLFKQNILKKGNGQVPVKANSALSDINKYGGYDKAISTCFSLVSYVNDKGEKVKQFVPIDLHEENKYLQNTKKFIDEKLSVDSTIIIPCIKYNTLISIDGFRMHLSAKSGDSQIICKPGMQLVLDNTSENYIKKIVNYLNKCAELKCEKTITVFDGISFDLNMQVYDALSVKLNNTVLNVKFANTANVIKKRKDVFKELSLREQCVVLMQLLSILHSNASLGDLTLICESKQSGRVSINSKIIPNKTAKSIKIINQSITGLFEQEIELLD

SEQ ID NO: 64 - protein, 1318 aa, unidentified
  REGION 1..1318: note = Synthetic sequence or unknown origin
MKQNGNHAAIGDYYIGLDVGTTSVGWAVTDKQYNISKFKGNAMWGARLFDEAQPAAARRSSRTARRRLARRKQRLLLLEMLFAEELNKVDESFLMRMSESALWPEDKSDTCPFSLFGGRDYTDKDYHRQYPTVYHLRNELVHSAELHDIRLVYLALHHIMKSRGHFLYADSNDGEAISVEAALSEFSEFVFAEYGISFEPAHREDFIAQLISGVGVTAKKKLLKAAADIKADDEAEISTTALLDLLAGATVKLSELYRDEELKSAEIKSVCLKNDLDEVFDELSELLGDRVELIPQAKRLFDTARLSSMLNGHKYISEAKVELYEQNKADLKLLKSYVRKAAPEQYKHIFSEKSDKLANYAAYTDGECKQEDFCKFLKSVLPEPDDGDPEVQRIYARIKDGTLLTRLKGSDNGVIPYQLHKNELTEILKNAERYLPFLKETDEAGLSVSDKIIKTFEFRLPYYVGPLNPVSPNGWAVRFPEHTGEKVYPWNFEKVIDTEASAAGFIENLIGRCTYTGEKVLPKDSLLYSEYALLNEMNLLRIDGKPLPIEDYRRLLDELFYKSKKKVTKKRIRSYLLAEGLIEEAAVISGVDDNIKSSLKSYHDFKSILERTGDADMVEDIIRSILIFGDDKKMLRRWLSRSTHDLTDDDIKYICRLKYSDWGRLSKVFLTGIYSPDEWGEAKSIMDWLRLGERNLMQLMSNDFEFAAHAAEHAAELFGTDRTLGDKLDDLYIAPSVRRSIRQTLRIVDEIVDIKKSVPEKIFIEVARENADEMNRKRTESRKDQLITLYKSCKEDSGELFERLENEDENSLRSDKLFLYYTQLGRCMYSGEPIDFGALSRGEMYDIDHIFPQSKVKDNSIDNRVLVKNGYNREKTNIYPINESIRTKMRPMWDHMKKYKLISQKKYDRLIRSFPLTDAELEAFVARQLVETRQSTKALAGLLKDILGEKVRIVYSKAGNVSDFRHDSDFIKCREVNDLHHAKDAYLNIVVGNVYDTRFTKRFFANIRNENYSLNKVFAFDTKDAWDTKTSMATVKKYMAKNNVIVTRMPREVKGQLFDLQLMPAGKGQLEKKSGLPIDKYGGYNKLSGAYFCLVEHTEKKKRIRTLEPVYVYKKQQFEADPEEYCRQTLGLTEPKVIVNRILIDSLLELNGQRLYVNGRTGERLIFKHSYQLTLGYEWEKYIKQLQKYSERCYARRTELPLTDHDGITRDKNEELYGLFIEKCRQKVYAELFGNMRADMEKHHEKFSAMSELGQVNLLLEVLKAFRCNAQKADFTNLCGKGSVGILVKSKAVSKLDSAYLVNRSVTGLYETKVDLLK

SEQ ID NO: 65 - protein, 1394 aa, unidentified
  REGION 1..1394: note = Synthetic sequence or unknown origin
MSDKSKKYFIGLDLGTNSVGYAVVDKDCKVVRKSGKRMWGSVLFDEGQAAASTRVQRSSRRRFERRKERIRLLQSLTAKSVTEVDPSFFARLERSFLLNAEKDNEFGRDNIFNLFDGEYTDRNYYADYKTIYHLRKRLCEDKSQADIRLVYLALHHMIKYRGNFLHDEERLQAGSEDLAKSIEEFFEAYYDKFPDEDEETGEIIGHADIPAEELADILKSKGKKSEKKDDIIKKICANDNSLKKKASAFASLLLGYKANLADLFTIGSGDEDKAKDVKISFDGADYDEKAESFPELFGDDGAELIGVLKKIYSDLTLSAIIGEGKKYVYEGMIERYEKNKKDLLMLKTVLKADERIYNEFFKESNEKKVSFVSYFKPHVRGKQNEIGKRASKDDFYKAVKNLLGSDKFPDSEAKSYVLSRIEEDDFLIKLNSTRNAVIPYQLNLNEMEIILDNQGVYYPELAENRDKIISLLTFRRPYSVGVIKPESRFAWVEKADVKDERAYPWNFEEVVDYDSASEKFIKNLTGRCTYFKDEYVLPANSVIYQAYNVLNELANVRIILSEGGERRLTVGEKQRCFKLFLDNSTVKTKDITSELFKAFRVDSKGLTGLGGDGKKFLSKMTGYRAIKTALKIDCFVEENGKIQTNYELFELYEKIAEILTVFNDCKIKRRALEKLFGEKFPKAAIDLLVKQNFVGWGRLSHKCLCKAEGANGLNVLETMYSTDKNFMSVISDETLGFKEIFDQKTDENSGEIKYSQINELYISPSVKRTVWQAVKVVKEVVKAVGCEPCGIYVESTRQDDKKKVTKTRAEKLKELYEKVRKDTDEYNKGFYEKSVGDNLKTMSDDKLNDDMVYLYMLQMGKSMYSGKSLDLKNLSTTCEIDHIVPRHYIKDDSFENRVLVLKQENQEKSGTLALKKSVRDEMTPFWMFLKSKGFIGKKKFGNLTKSEYTEKDMTGFINRQLVETNQSMKAVRDLLKSRYSSSDVEFIKAGISSAFRSAHTQKGYVEFFKLRELNDFHHAKDAYLAAVIGYFTRKIYPIWGANDQSRILRDEIESSAGRDISELREKRYGIVVDSMIYATPDRDDDVIWNTCYNNILSAFLNNDCLVTRKKEEASAQFYKATIYRLRAEKGVNLRYAVTRSGEKKPLPLNYGNYDGESDAYFVLATVQKGKKTETVLTGVPVRIAYLAKKNETAVDDYLKSYFEANKKVYVSHDKRRILKYQLIRYNGQLCYITAATEVINAEQLIMDKRYSLLLYCIAHPNKKVTVKDNVYRLTAVENGEYFTNLMKEFVKAYAEKLNERYPLYAKYADGAVAYVESEKFATLPLYAEKEACKAAYILNLLNLTKAGSTQLDMRKYDGSTSWGRLGGKTIRKDEVDWIDTSITGIYRTEIKGEQ

SEQ ID NO: 66 - protein, 1321 aa, unidentified
  REGION 1..1321: note = Synthetic sequence or unknown origin
MKNNGNNLKTGDYYIGLDIGTNSVGWAVTDEEYNVQRFKGNSMWGVRLFEEASGAAERRSSRAARRRLARRKQRMLILELLFSEEIAKVDPNFFVRLRESFLKTDDRSTDARYSLFNDKNYTDKDYLKQFPTIYHLRSELIHSKEKHDIRLVYLALHHIMKKRGHFLYEADGNVTEKSLVEYIDELNYFLSSEYGYELDFEDKEKYALVLEKNDINVTQKKKLLREKLGAQQEQQEYNPLVLSDLLAGATVKFSDLFCDDELKNTEVKSISLKNDIDAVFESLTAAIGERIELILNCKIVFDAARLSQILGGNTYISDAKIQLYNKNKNDLAKLKEYIKTNYPQKYKEVFTTKKDKLNNYVAYSKNKLRSGDYCCSQESFCKYLISQFPEMKNTQGYENMCFEIENSTFLSPLTGTSNSVIPHQLNLSELEKILENASSYLSFLNTKDEDGLSVADKIISTFKFRIPYYVGPLSEKSPNHWIVRSKEKIYPWNFHKTVDTKRSAENFIINLIGRCTYTGEYVLPKDSLLYSEYCLRNEINLLRINGKELPRTVMDELYETLFVSSNKKVTKKTIKDFLLIKGYIINTDELSGIDDTIKTKLKSYHDLKNILLKTSNPELVEEIIQRILVFGDDKRMLRQWLVENCRMLDKKDIDYVCRLKYKDWGRFSKRFLTEIYHTDKSGKAFSIMDMLRTNNMNLMQLLSSDYNFLEEAEKVRKENSSQDYSLQKRIDEMYLSPAVRRSVRQALKIVDEIVDIKKCAPKKIFIEVARGSREEMKNKRTTSRKNKLIELYQACKEDSNPLFEQLCNEEENRLRSDKLYLYYTQLGKCMYSGEIIDFSSLATENSKYDIDHIFPRSRVKDDSLDNRVLVKAELNREKTNTYPVDNIIRERMHSFWKMLKEKGFISDKKFTKLQRQTPLTDKELSEFVARQIVETQQSTKAVASLMKDMYKDTRIVYSKAGNVSDFRHKYEFIKCRDINNLHHAKDAYLNIVVGNVYDTKFTDNFFKNISGENYSLNKVFEFDTPSAWDAGGSSIKTVKHYMGKNNILVTRMAREGRGKLYDLTVLPAGKGQHSINENLEIEKYGGYNNVYGAYFIVVEHTSKKKRIRTIESVLLCDKPLYEKNPTEYCVKKLALEDPEIIVPIIRMDSLLEINGSRRVITGRSNVQLIYKHTYELAIDTIHEQYIKNISKYVDRCSGLKKELDITEFDKISAEENMELYSWFIKKLGANVYRPLFSNVLNYLNKCGNVFESLNMLEQCKVLLEILKTFKCDRQVSNLSSLCGKSSVGTILTSKNLSNMDSAYLINQSPTGLYEVKVNLLK

SEQ ID NO: 67 - protein, 1324 aa, unidentified
  REGION 1..1324: note = Synthetic sequence or unknown origin
MKKEYYLGLDIGSESVGWAVTDTDYKIPKFNGNAMWGIRLFNESESAEQRRGFRSARRRYNRAKERITALEMLFDEEISKLDVAFFQRFKESNLYPEDKTDGIPFCVFNDKGYTDSDFHRDYPTVYHLRNELISNQNAPYDARLVYIALHHIIKHRGHFLFDINCDDYNPDDFENIYEDFSSFLSENYEIELNCSSIENFCNVLKNRKLYKSNKEKQIAQLFNVKKNEDKQLYSMLKTLSGSKVSLKDIFCDDELSFDENKKISFSEKYDENVAEYEELLGDRFELIEKLKAIYDWGVLAEILNGEKYISQAKLAIYNEHSKDLKTLKQYVKSYLPKKYGEIFRRSSKSNNYVAYSGHLKGNEINHKCDQNEFCAYLKKELNECKDDAYRSMFDKIEFGTFMPKQVSTDNGVIPMQLHEIELKAILKNAENYLPFLSKADDSGLTVSDKMIKIFEYRIPYYVGPLNTHSPKSWLTRKDGKIYPWNIEQIVDYDKSAENFIENLTSKCTYLPKYDVIPKSSLLYSKYSVLNELNNLKIDSSEISVELKQDIYNDLFLKYNKITKRRLSDYLESKGISYKILSGFDGDFKSSLKVYRDFAAYNLSVEDKEEIIRLITIFGDDKRLIKKRLKNNFADKLSESEIIRISKLKYSGWSKLSKELLTRVNAVYKPTGEVMNIISALWNTNMNLMQILYSSDFCCDDSENKSFEKKLYELNSFAGEKSLRQAVEELYISPKVKRPVYQSLLIAKEIEKIQKCPAKKIFVEVARGSQEKKPTDSRKKKLDELYKSCKNEYPKQFAELENTKAEQLKSDKLYLYFTQFGKCMYTGEKIDVDTLMQHNSIYDIDHIYPRSKIKDDSLDNRVLVKKTVNANKTNEYPIDSQIREKMGDFWKMLRDKELISDKKYLRLIRSNPLSDEELCAFISRQLVETRQSTKAVAQLLEQLYPNTEIVYVKAFIASELRQTYDMLKCREVNDFHHAKDAYLNIVGGNVYNVRFTHNKINFVKKLQLNDKEYTINLNSILKHDIPGAWVAEGEQSLKIVKGTMNKNNIRYTRYAFKQHGGLFDQNILKKGKGQVPIKANGKRNDIEKYGGYNKAASAYFSLVKYFDKKGKSVIQFVPVNLYNEKDYQNNPKEYVSNIVEFDCEILIPYVKYNACISVDGFRMNISSKSGNQIFCKPAMQLILGYDNEKYVKGLVSCKTKGFTNDLIYKYNIEKSNNLALYDLLINKIKSTILSVKFEKLASDMLAGREKFELLSLEEQTDVIFEILKILHCNVVTGDLKMIGGSGKSGIVSINSAVSNTKGVKSVKLINQSVTGLYEQEIDLIK

SEQ ID NO: 68 - protein, 1328 aa, unidentified
  REGION 1..1328: note = Synthetic sequence or unknown origin
MGKNYYIGIDMGTDSVGWAVTDEEYRLLKSKGRDLWGSYLFEEAQAAAQRRSFRTARRRTARTRQRLLLLQSLFAEEMAKVDPLFFLRLNNSSLFLQDKDGKLRCSDALFGDPSYRDKDYFAEYPTIYHLRAALLQGEVKDIRLLYLAIHHIIKNRGHFLFESQSFSVGDTQTVREKFTAINAFLSDREMPTLELSALSEGLEVLRNSRIGKRDKQLRLKDIFKTGGEKSLIALVKALTGGSVNLKELYCAEESFADVSVFSFEKASFDETDLPAIENAVGQEEAELVLLLKSVYDWSVLCAIMGEEQFISLAKKKIYEKHKADLCRLKEYIRKNCPEKYADVFRRREKKSNYAAYIGMDKQKGCAKCKRGDFYAFLKKEIKIEDEYILTEIEKGEFLPKQVSDANGVIPYQVHLLELKAILANAAGKFPFLTDERDGSTVAEKIISLMTFRIPYYVGPLHTQSPFAWAVRKSGYERTSVTPWNFDSVIDADASEEQFIRRMTNKCTYLAGQDVLPANSLLYSEFTFLNELNNLRVNGVKNDAARKLIYEYAKQHKKVTLKNCLALLIREGLLPVGSRAEETFSGIDGDFKTSLAPWYDLRFLGNKIETHREMCEEIIIWITLISDKERLEKRIRRAYGTILSDEEIKRFKGLNYSKWGRLSAVLLDGIVSPRCADENGEPLTIIRAMRATGENFMQLLSAKYGYQEAIDAYNAENAPRGKVTYKTVEDLYCSPSVKRAIWRTVELVREIAKICGGAPKKLFIETVREVNDDRRGQRTVSRKQQLIDLYKNIKKEERDWIAEIENTADKKFDSDRLVLYYRQLGRSMYSQKPIRLEDVFDTNICDIDHIYPQSKIKDDSLDNRVLVFKTENTAKGDRYPLSADVREKMISFWRELKDRALIGEKKFERLTRTTALTQEELADFINRQLVSTSQSTKAAAQILGEIFPDTEIVYAKAGNANRFKDENKIVKVRELNDLHHAKDAYVNIVVGNVYNTKFNHNAAVYFRDHGVDSYNLKNLFTHDIPGAWKVSEKERILQTVAKNTCRVVRMTENGKGKLFDIQPKSAGKNADLIPLKICGAISDTAKYGGYDSATTAYFMLVRSKGKKGKVALSLEAYPLWLDKRGGGAKEDKLRFCVERAGLKEPEIIVDNIKLNTLFCIDGSYAWLRGKTGNRVVWCNANELFLDEESMRTLKNISNYMRDRKRLNKPDLCAGDKITAECNIRLYDALVEKLGSSVYAGLSVKGQVPFLRGKREAFAELSREDQCKIIFEVLHLMQCNSVLSDFSSLGGVAHAGSILSNKFVQDMDIKMIFQSPTGYYRRVVDLKEFI

SEQ ID NO: 69 - protein, 1331 aa, unidentified
  REGION 1..1331: note = Synthetic sequence or unknown origin
MKENGNDRRQGTYYIGLDVGTNSVGWAVTDENYQVKKFHGNAMWGVRLFEEAQPAADRRTSRVARRRLARRKQRLMLLEFLFAEEIHKVDPNFFRRLHESDRWEEDRATRCPYSIFHDAGFTDIDYHRNYPTVYHLRSELLQSTQPHDVRLVFLAIHHIMKTRGHFLYETGDNGDEILTVAQAFDQLNQYLQDEYDQMLEPVDQNAFLDLLQNNGMGITAKKKALHGAYGLVSDISILKFSALIDLIAGASVKPDVLFGDQTLKDLTSINLKNGLDELEQYREALGERFALLEFTKTLFDAARLSQIRKGYTYISQAKVAQYQENASDLRKLKQYVRAQIPDQYRMIFSEKKKGLDNYAAYSQYKLTQKDYRCDQEKFCKFLLGKQVGLPEPQESDREMCEIYRKIKDGAFLPKLRSSENGVIPYQLNRQELVQILKQASLYLPFLNHVDSDGLSVSDKIIKTFEFRVPYYVGPVSDQAGHHWAVRFQGKENEKIYPWNFEQVIDLERSAAGFMEDLVGRCTYTGEPVLPKDSLLYSEFMLLNEVNLIKINGKSLPVNVKKQLVQDLFYHSSKKVTKKGIVHYLTSKGLMTQSDELNGVDDRIKSTLRSYHDFKDILKRTGDRDMVENIIRSILVFGNDLTMLQRWLKNNTHDLTEEEIRRICNLRSKYKEWGRLSRTFLTEIYSPDEWGEAKSIMDYLRDTSCNLMQLLSNQYQFADQAKAHFDALMGNGQTLSQKLDDLYVAPAVRRSIRQTLRIVDEIVDIEHGVPKKIFIEMARDNAQEVKKSRTESRKDKLIALYRACHEDSGELFQQLEQEEDSRLRSDKLFLYYTQFGKCMYSGEPIDLESLLRGELFDIDHIFPQSKVKDNSLDNRVVVINTLNREKSNIYPIQGEIRRKMQPFWAMLKSKGMISEKKYDRLVRNTELTEEELSSFVARQLVETRQSTKALATILQETYGDQVRLVYSKAGNVSDFRQQFELVKCRDVNDLHHAKDAYLNIVVGNVYDTKFTEVFFRNIKKEKYSLKKVFEFDTPGAWDKTESIKTVKKYMAKNNVLVTWMPQEKHGKIFDLMLVRAGKAKVNKKQGLDQEKYGGYTMRYCAYFCLVEHRIGKKRVRSIKPVYMYQKVAYEQDPLEYCRNILMLHEPRVIVQKILVGALMELNGKRLTLTAGEEGRIKLNHTYQLIVGEKYNQYIKNASKYYDRCTAQKAELPVTQFDGISDKDNIDLYHELIRKCKTSIYSSCFGAFNIIAEEMEKCEDIFTGMSTLDQIKILLEVIKAFRCNAVYANFKQLSGQQVRGRIRINDKISELNTAYLINQSVTGLYEHRIDLLK

SEQ ID NO: 70 - protein, 1331 aa, unidentified
  REGION 1..1331: note = Synthetic sequence or unknown origin
MKENGNDSRQGDYYVGIDAGTNSIGWAVTDENYRVKKFKGNAMWGVRLFDEAQGADERRTNRTARRRLVRKKQRLMLLELLFAEEIAKVDPNFYLRMQESGLWRDDKTGDSQFALFNDEGFTDREYFQKYPTAYHLRCELLHSEDPHDIRLVYLALHHIMKTRGHFLLDGVEDVEQMTTLDGALDELAAFLQEEYELYFVPKNRAEFIAALETRDIGINARKKALKDAYGKAEDAEDLSIPALLDLLAGAAVKPEVLFEDNSLKDGDVSSISFKNFEDEQENYSELLGDRMETLLKVKNLFDTAQLALILNDKTYISEAKVAQYEQNGHELHLLKEYVRKRIPDKYKLIFDEKKEKLDNYVAYSGDKRRSGAYTCTQEAFCKFLRGKNVELPEPDASDTEMCTIYAKIKDNIFLPKLRSSENGVIPYQLNKQELERILELAAQYLPFLNVVDDDGLSVREKIVKTFEFRVPYYVGPVSDKAKHRWAVRFDEKAKTKVLPWNFEHVIDTEGSAIAFMEQLIGRCTYTGEKVLPKDSLLYSEFALLNELNLLKINGKSLPINVKKQLVQDLFYSSKKNVTKKTISRYLRAEGLMTEEDEVSGIDDKIKSKLRSYHDFRDILVRTGDTAMVEDIIRSILVFGNDKKMLRRWLEHNTHDLTEAEIKHICHLNYQDWGRLSEIFLTKIYSPDENGEAKTIMDYLRETNCNLMQLMSDQYLFAENAKKHYDELFGNGQTLTARLDSMYIAPAVRRCIRQTLRIVDEIVDIEKSVPKKIFIEMARDRAQDVKKGRTESRKDKLIALYRSCKETGNELFKRLENEDENRLRSDKLYLYYTQLGRCMYSGEPIDLESLLRGELYDIDHIFPQSRVKDNSLENRVLVKNTLNREKTNEYPIKSEIRKKMQGFWYGLRQKGLIGQKKLERLTRATPLAEAELSSFVARQLVETQQSTKAMATLLQDIYGDKVRIVYSKAGNVSEFRQKFEFIKCRDVNDLHHAKDAYLNIVVGNVYDTKFTQRFFVNIKNEKYSLRRIFEFDTDGAWKVGETIRTVKKYMAKNNVLVTRMPREVRGALFDLQLMPATKGQLARKQGMDIGRYGGYNKLTGAYFCVVEHTEKKKRIRTIEPVYLYQKSAYESDPVAYCKDILGLCEPVIIVPEVRIDSLLEINGSRFMISGRTGNRIVVKHTYQLLLSNAEEQYVKNLGKYNDRCAAKKEELPVTEHDGISAEENLNLYRLLVKKCNEKVYSTCFTTFIIMGNEMKEYENKFIAMSIWEQTKILLEALKAFRCNAVYGNFKELSGKGTRGLILMNKKISELSSAYMINQSITGLYEHRVDLLK

SEQ ID NO: 71 - protein, 1336 aa, unidentified
  REGION 1..1336: note = Synthetic sequence or unknown origin
MKANWNYSVQGNYYIGLDVGTNSVGWAVTDEQYHMKKFKGNAMWGVRLFEDAKSAEQRRVSRVARRRLERKKQRLMLLELLFAEEIAKIDPQFYLRMRESDRWADEKQSGSKYSLFHDTDYTDKEYHQSYPTVYHLRSELLGSSQPHDIRLVYLAVHHIMKNRGHFLYEMSDHSNEIMTVPIALEELQQYIQDHYGRDFEPENREQFVTELQRNDIGVTEKKKMLKKAYGRIDECEELGISALLELLAGASVKLAVLFADPDLKNGEVSSVSLKDIDENADTYVDALGDRIGLLESAKTLFDAARLAQVRGDHTYISQAKVAQYEQNRSDLRQLKRYVRRTIPDKYNLIFSERQEKLNNYAAYSQYGLQHGDYHCGQEAFCKFLLGKEVGLPKPEESDTEMSTIYAKVKDGIFLPRLRGSENGVIPYQLNRQELVQILKNASTYLPFLNRVDEDGLSLQKKIIQIFEFRVPYYVGPVSNRAGHHWAVRFSGKEQEKIFPWNFEQIVDTESSAAAFMKNLVGRCTYTGEPVLPKDSLLYSEFALLNEINPIQVNRKPLPLDVKKQLVQDLFYRPEKGTQKRTVTKKDISNYLISRGLIGEGDEISGVDDKVKSKLRSWYDFEDILSRTGDRDMVEDIIRSILVFGKDKKMLRRWLKKNTHGLTEDDVKHICCLKYQDWGRLSKTLLTEIYSPDKYGEAKTIMDYLRDTNLNLMQLLSDDFQFASNAKAHFDALYGNGQTLSQRLDNLYIAPAVRRSIRQTLRIVDEIVDIEKGVPKKIFIEMARDDARAIKKKRTESRKDKLISLYKACKEGSGELFERLANEDENRLRSDKLYLYYTQFGRCMYSEEPIVLDALLRGEKYDIDHIFPQSKIKDNSLDNRVLVKNTLNREKTDEYPIKTDIRQKMQPFWYSLKQKNLISQKKYDRLTRGTKLTNEELSSFVARQLVETRQSTKALATLLKETYGNMTRIVYSKAGNVSDFRQKFGFVKCRDINDLHHAKDAYLNIVVGNVYDTKFTKQFFANIQMENYSLKKVFDFNTPEAWNTVESIQTVKKYMTKNNVLVTRMPHEAKGALYDLQIMPAGKGQLPKKNGMSTERYGGYNKLTGAYFCIVEHTDKKKRVRTIEPVFLYQKEAYERDPVIYCQSILGLKEPVIIASKVRIDTTMELNGNRLLITSRTGNTIIFKHTYQMIVGSEFEQYIKNLSKYNDRCKAKREELPVTSFDGISREKNMELYQLLTRKCGESVYRVCSSAFTIMGNEMAAYEDKFAGMSLWTQVKLLLEALNAFCCNTTYANFKELSGKGTRDRVEFNKNLSVFSSAFLINQSVTGLYEHKIDLLK

SEQ ID NO: 72 - protein, 1336 aa, unidentified
  REGION 1..1336: note = Synthetic sequence or unknown origin
MKNNGNDRIKGNYYIGLDVGTNSVGWAVTDHDYNLHKFKGNAMWGARLFDEAQDASLRRTSRTNRRRLARRNQRLLLLELLFTEEISKVDPAFFLRMEESALWLDDKTNKMCRFSLFNDADFTDKDYHRKYPTIYHLRHELMTSSEPHDIRLVYLALHHIMKSRGHFLYETTSRDDSIRPIEEVFKDLENLLESEYYIALEPDDLNGFLNTLTRKDLGINAKQKLLKAAWGGKENKETLVNLSAAIDLLAGKSGIKLSTLYNDESLAGVDPEKISLANGFEENLDDLSAILGDRISLLIQLKELYDTALLGQMLQGYDSISAAKIALYDKNKKDLRALKHYVRQNAPEKYKEVFVLKKSKLNNYSAYSGYKTRSGDHSCSQEEFCKYLISCKLPAPKADDEIMNRIFDEIKEGTFLTKLRGTENGVIPYQIQRMELRAILKNASKYHTFLNGKDEDGNTVSEKIEKIFEFRLPYYVGPLNKQAGSYWAVRFPDKEGEKVYPWNFEKIVDTEASAKKFMTNLIGRCSYTGERVLPKDSLLYSEYMLLNELSPLNINGKPVSVEIKQAIVNDLFKKEKRAVTKNSIRNYLLSRGYIDKSVGKDDIGGIDDRIKTSLRSYHDFQAILDRTGDQEMVEDIILHILVFGNDRVMLKKWLRNNTHGLNEEEYDHICRLKYTDWGRLSKTFLTDILSVDPEEGTGELHNIIYMLRNTNKNLMQLLSDRYSFSAQAEEHRKELVGEKQSLAERLNDMYIAPAVRRSIRQTLRIVDEIVDIEKSVPEKIFIEMARDSSKAMKGKRTESRKEKLLALYANSKEEAAELLPKLKNEDDNRLRSDKLYLYYTQFGKCMYSGEPIDLDALMSGQGFDIDHIFPQSRVKDNSLDNRVVVKNTLNREKTNNYPIEKNIQRSMRSYWDMLRACDMISSKKYDRLIRATPLTDEELSAFVARQLTETQQATKALTVLLQETYGDLTRIVFSKAGNVSDFRHDFDMIKCREVNDLHHAKDAYLNVVVGNVYCTRFTDRFFANIHNENYSLNKVFAFDVPGAWKKEETIKTVKKTMSKSNPVVTRMPREVKGQLFDLQLMPAGKGQLEKKRSLRIEQYGGYNKITGSYYFVAEHTVKEKRIRSIEPVYLYAQKQYEADPKAYAVSVLGLVAPEIICKEIRADALLEIDGSRMYISGRTGDNYVCEHAYQLAIDVDKEKYIKLLTKYAERCAARRAPVAITKYDGITAEDNEELYNYFLKKIEGGVYAKLLKNMKKDLEESKNTFLSKSLYEQALILLEILKPFRSNAQNANLKDLCGKGTVGRIIVNKKLNMHASAKLVHQSVTGLFEVSENLLG

SEQ ID NO: 73 - protein, 1337 aa, unidentified
  REGION 1..1337: note = Synthetic sequence or unknown origin
MKKYNIGLDIGTNSVGWAIVEDSTNKVLKKGKKSLWGVRLFETAETAEERRKHRSSRRRYDRRRQRIKLLQKEFCNEINKVDDKFFTKLKESKYHEKDTLNKTVKLTKTEKQMLKDYYEKNPTIYHLRNYIANTTEKVDIRLVYLAIHHIIKYRGNFLYPFKNINIDKLDIAAQLQNAFSLLYDTTAIEDEAFIEEIDFNELEKDLLLQSKKDTMVEIDKIVNKFLDKKTTSEIKQMLVGNSFSISKLFNKEEDKDFKIKFSNNEYEEKYAEIEQNYPENIEVLNEFKNVYDMIFLKKIFKDTDDVSISSYMIQKYNQHKKDLKFLKKIFSQDNKNDSKELIKLRRKHYLEIFKSNSKRICLYDTYIHNKIDYETFIKNIVKAAKEILNDEQYNTTIKRIENEKFLPRITEKENSAFPYQLNKEELIKIIESQSKYYPFLKQKIDEEYKLVKLLEFRIPYYVGPLNNTTSKASVKNTNSWIVKKSNENITPYNFDEVVDLDETAEKFISKMQASCTYLLNEKSIPNNSILYSKYKVLNEIKQIRINGEKVSVNLQNKIYNELFLKKAGTITDKVFRNYLKQTNEIRMYDGIKITGYSADGKFANNMQPYIDFFGENGIFKNTNYKLNDAEVIIHWMTIFEDKKILKRKITKTYPELSSDAINKILVKKYKGFSRLSKKLLNGIYYTEKDTKNTKTIIELMEETNENFMQILNNKKYEFQKQIDDLNDIKQDDKISYEIVNELATSPSTKKGIYQALKVVDELVKYMGYDPNIISIEMARGNRKSRRTIDRKNFLINLYNKYRDDIENYDLLFKELKETETISMKLFLYFIQQGKSLYSQEPLRIEKLDSYEIDHIIPRTLIKDDSIDNKALVLKEENQDKAASFVLPAKYRTITRIDWWKKLLDNGFISKKKFYNLCRREYSDSDIEGFINRQLVESRQITKHVANILKNFYKKSKIVYLNADLSSNYRKKYELYKFRDINDFHHAHDAYLACVLGKYKQDYLKVIDYEELKEKNKELFDKKEYNTLKYGYIINSLEENIYHKDTGEILFDATHFKKIVENSLYQNDILISKKTEIRNGKLYDETINKKGAKGVPLKKNMATERYGSYSSIKPAYAVVVKYHYKNEDLQKIIGIPIYIEAFTKKDKVIKEKYIKELLNLEENDRIDIIHDKIPFYTTIEYDGKICFLVGATDKVEVCNAKEFYFSKEKMKEWKHTLNKLLNKEESLKENDNENKYEEDLENIIKYIVSKMEKEYKLYSELVEKLKNMIINKIDKFSLEEKKRIILELFHLLKVNSTTANFKFLQEASAFGRMNNKTIRSGKLVNNSITGLRKNIHEF

SEQ ID NO: 74 - protein, 1342 aa, unidentified
  REGION 1..1342: note = Synthetic sequence or unknown origin
MSIQSVKKDYFLGVDMGTGSVGWALAYMDYSVVKYKNKLLWGSHLFDTAQTAVEARLNRSTRRRYARSAERVKLLQELFAEEIARVDFGFFQRMEESRLWQDDKTENQKNTLFNDVGYDDGIYHSEYKTIYHLRKALIDGGKSFDVRLVYLALHHLIKHRGHFLFGDRVLGDVRNFDTAFKAVSSVVYEVLGAELKVDDISKVGEVIKNRRDGLTKREDALKALFGVQKGDKRMQELIKLMVGSTADLKKLFMLEELENKSVKLSDNNVEDVLLNVSEELDEDYYAVVDAVKMMYDWGTLENILSGHNYICEGKIEAYEKHKSDLERLKRVVKRYFSADYNKIFRTENEAANYCSYTGVSKLPLKNGKKCTQADFCVFLKKLLVKNAACETDEDYLYIVEELEKGTFMPKQTTSQNSTIPYQVNKMELCKILENAEEYLPFLAERDENGLTVSDKIKKLFEFRIPYYIGPLNDTHQNKRVNGSCWIVKKQGKVYPWNFDAMVDTDESAERFISKMTNKCSYLLGEDVLPDKSVIYSKFKVLNELNNLTINGERSPELKQELFNELFLKQKKVRLKDIESYLRGRGYEVNAIAGISGEIKNNMSSYITFKEIIGDKADNITMCEDIIRAITLFGAEPKMLKRRIEKHYGDVLTADEIKRLCRLKYKDWGRLSYKLLCGITDEKTGTCIINAMQELGLNLQELLSSRYSYMSQIDELNNIGESVGIREEIELSALSPAVKRIAIRTLDVTGEAVKLMGYPPKKIFVEMARDVDGKNEKKTKPSRKDKLSELYKNIDDRVLAEEWKAKLDNETNDSLRRDKLFLYYSQLGKCMYSGEKIDFEQLNNDNIYDIDHIYPQSVTKDDSLENRVLVRRELNENKGDTYPISSDIRRKNYAHWKLLHDKKLIGDKKFARLTRDEELTDEELAGFIERQIVETRQSTKYVATLFKRLYPDSEVVYVKAGHVSDFRHDMDIVKVRDINDLHHAQDAYLNIVVGNVYNVKFTHDVLRYIKNNRGKRDYNLKKLFKYYTVTDRSTGEIVWKSGEGGTIADVKKQLESFNIQCTRFAVTGKGKLFDVQPIPKHKCGEGVQIPLKENDSRLSDVTRYGGYNKVKIAYFFCVEHTEKKKRIRTIEVMPIYLADRVGEDGLLDYCIDSLGLIEPKIIVKKIKLYSLVKINGYFYYLSGKQNDRFLMYNAVQLCVDKQSSEYIKKLVKTRKILSEDKEYDVAEQKINYDENMALYDLFVEKQKSGIYSKRINNALKIMENGRVRFAELSLSNQCIQLVNLLGLFTGGACNGVNTELIGGQSKGNKITTSKVISNNIEFKLIYQSPTGIYQTVIDLLGES

SEQ ID NO: 75 - protein, 1342 aa, unidentified
  REGION 1..1342: note = Synthetic sequence or unknown origin
MEKKKQFGKYYIGLDIGTDSIGWAVTDTNYELQKFNQKSMWGSRLFPEAQTAVDRRVNRVARRRIQRRNQRLALLQDLFKDEVCKNDPQFFARLSESMLHAEDKTVGGKNSLFGDSVIDDKAYHKKYPTIYHLRSELIHSDKPHDVRLVYLAIHHIMKYRGHFLFEGSLDTESTFDNIMKSFCEEVEDSLGIPFDCSELPVIKEVLCNRGITRTEKQKKLFSLFDCKSNSQTAALLKMINGSVVKLKDVFPVGEESEEEIKIEFGSDSYDQLIPKLEVLLADDYSILSKAKAIHDWALLEGILHGKEYLSDAKKDIYDQHAKDLRLLKKLIRRYCPNEYDSLFKDPSDDRNYCAYVGVAKVKGKKVPVVKSCTQADFCKRVKSTLEKIKADDPELEEARARLSSENFMPKLRTKDNSVVPNQLHLKELKKILQNAEKYLPFLKSADQDGTTVEEKILQILTFRIPYYVGPLNDRDPKAQNTWVVRRSHEKIYPWNFDEIVDREMSAAAFITRMTAQCTYLNDHTVLPQNSLLYTRFMVLNELNNLKIDGEPISVSLKQDIYRDCFETHSKVSMNVLLKYLKTRGMLIEKDQVTGIDGDFKGSLKVWREMRDLLGDCFTIEIAEEIVRLSTLLGEDRKMFCEKLRKEFRQELPEEVIIRASGKRYTGWGRLSKEFLTCIHDDHYDPETAEYPNIITALWESNENLMQLLGGSHGFAEAVRKYNETNSQDYGFSYQTVKDLYLSPSIRRSVWQTLRIVKEIRGITGHDPEKVFVEMARGGGEKNKRTQSRKSKLLELYRSCKDETRDWMLELNAREDSDYRSDRLYLYYTQMGRCMYTGESIDLDHLFDANVYDVDHIFPQSKVKDDSIDNRVLVKRVVNAEKTDVYPIDKKIRNNMHSTWSMLLQKGFISKKKYDRLLRGTKLTDDELSDFVSRQLVETRQSTKAVADILGHLLPDTEVVYVKASLVSDFRKEYDLLKCREVNDLHHGKDAYLNIVVGNVYNTKFTKDPRNFFREQDHTYSLNKMYQFPVRRGETVAWQPGESGSITVIKSMMRKNNVLVTQMVVEKKGQLFDLNPVRKNHWQLPLKKGMACLADPSKYGGYNNVKGAYFMMVESIEKGKARRSIVDMPIHLAGIDPEDPAVIEMLVRDKGLNEPRILVPHIGINSIIEIDGCRMYLTGRTGTNLDYALAHQLILGYENELYLRNILKYCDRDMEYSHTHRNEELKISEYDGLSAEENLKLYDLFVSKLENTVYRVRLSAQAENLKKARGRFEELSVEKQCKCLKQALNLFTCNKVKADLSIIGLGSQLGSIRTARCISNYESVWMINQSVTGLFESRSNLLS

SEQ ID NO: 76 - protein, 1343 aa, unidentified
  REGION 1..1343: note = Synthetic sequence or unknown origin
MTKFNKDYYVGLDVGTDSCGWAVTDTDYNLVKTAGHDFWGSYMFENAQTAEERRLNRTARRRTARVHERLMLLQELFADEICKADPLFFIRINNSQLFIGDKDKALSSANILFDDKHYSDKDYFYEYKTIYHLRSELIDNPVTDIRLLYLAVHHIVKNRGHFLFEGQTFDVNDRKNVLTKFEEINNYLSDNDMPVLELTNINEVLDCIKDNNLGKKAKTTKLKELFGITKDKQQLAIINALSGCNFSVNNLYCTDEDYEIEKISFDDSLYDDKFLKIENEVGADNAVLVSNLKAIYDWAILSNIVGDSKFISQAKVKIYEEHKSDLAYLKTYIRNNYDIDTYRKIFRYHKGIPNYSAYIGMDKQKGYSKCSKTDFYAFLKNTIKINDDYILKKIEDGNFLPKQVSSANGVIPYQLNYAELKAILNNAEKYFPFLSKEQDGLTVSQKILMLMRFKIPYYVGPLNDNNKKFAWVKKYDGMQNIKITPWNFDKIVDLDGSEDAFIRKMTNKCTYIQTEDVLPANSLLYSQFAFLNELNNLKINGVKDMRARDIIFEYAKSHKKVTLKACLNLLQKNAIISNNSTTDIFSGTDGDFKCSLAPFVDLKFLGDKLYTKPQMCEEIILWITLISDKDRLAKRIKEKYGKYLTEEEIKKLKGLNYTKWGRLSKKLLCEIKSPYCVDENGECLSIIQAMFATGENFMQLLSGKYGFADSIKEYNESISQSTAVTYKTVKELYCSPSVKRAIWRSLDIVKEIEKIIGKPPKKIFIEMAREVDDKSKKGKRTTSRKEQIKLLYKDIKDNERDWKEEIEETVDSKFNSDKLVLYYMQKGICMYTGKPIRLQDVFNTNICDIDHIYPQSKIKDDSLDNRVLVYKTENSAKNDVYPISSEIRRNMSAYWKELLKGDFISEKKYARLIRNTPLTIEECTDFINRQLVETRQSTKCLAQILRQYFGDKCEVVYSKAGNVDRFKQDNKIIKIRELNDLHHAKDAYLNIVVGNVYNTKFNHDASVYFKKNDVNSYNFTKLYEKDIEGAWKVDDRQRIIDTVNKNTCRIVRMTESGKGALFNVNPVSPNGQEADKLQNWIPRKLRLTNTDNTAIADVAKYGGYTGINTAYYMLVKSVDKKDYKLSFVAYPLYLEKLYNGALENKLKYCLEAFDLKEPQIVLDYIKKYSLINVNGNYYYLVGGATPTVKSVEFNNAYQLYLENKEMQILKLVLKSLDKNDSKNINKVIVNENVNKDDNIQLYKTFVNKLSLNVYCKIPNIQNVIKSLNDEENTFEQMDLKKQCIVLSQMLNILCGRAADLSLLGIKSVSERIRFTVSKQDNIKIIYQSPTGYHRKIINVKDLL

SEQ ID NO: 77 - protein, 1344 aa, unidentified
  REGION 1..1344: note = Synthetic sequence or unknown origin
MENNKKYNIGLDIGTTSVGWAVVECENQKIIRKGNKALWGVRLFEEANTAADRRNKRSTRRRYDRRRERIRLLQEEFKEEINKIDSNFFTKLKESFYHEDDKENKTIPLTKEEKETIKEYNNKYKTIYHLRNKLINSTEKEDIRLVYLAIHHIIKYRGNFLYNSDNFSVENLNLETQIETILNSAINFCPSLECPTDYKEYIKINDLSIALLDSSKNDRKVKVQKILESILPKIFVSEFIKLINGNKFNIIKMIGLENIDKLEISFNGTDYEEKYNELESILGDSIEVLDSMKQLYDMVFLKRLFKSSESTNISALMVEKYELHKKDLKFLKSILDIDRKIYNKIFKSRKEICPYENYIKNKITNEEFVKEIKKYLPSIFEKNINQELLTYYEANIQKRMENGDFLPRITDKDNGKYPYQLNKEELIKIIENQGKYYPFLLDKTKDDTYKLVKLLEFRIPYYVGPLTEESHSKFAWMIRKNYNEKITPYNFDDIIDKEATAEKFIKRMISHCTYLLEEPAMPNNSILYSKYKVMNELKQIRINGKKMSCDMQNKILRNLFMTTSGNITDKKFKEYLYANKDFDMYQGDFNITGYSADGKFANTMQSYIDFFGENGIFSNTNYTLEEAEQIIEWITIFEDKDILKTKVERDYPLLNDSQIKKIISKKYSGWGSLCKKLLTTKYYVDKESGVTKSIIDLMEETENNFMQIINDDTYNFQKMIKENNKIDVTQKLNYSVVECLATSPSTKRGIYQALRVVDEIVKYMKKEPEAIMVEMARGDDQKKRKDDRKKYLIKLYEKAKEEIEDYNQLMQQLGKFEKIDSQKLFLYFIQEGKSLYSGKPLNIEDLATYEIDHIIPRTLIKDDSIDNKALVYREENQTKAANYILPREFRSQFNRAWWEHLRKIGLISSKKFHNLIRSEYKEEEIENFINRQLVETRQITKHVANILNSYYKNTQVVYLHADLSHNYREKFELFKFRDINDYHHAHDAYLAAVLGEYKEKYLKCKVNFEMLKELNKSLIEQKDYKKLKYGYVINSLDSSMNDVMKEVVSIHFDEKTGEVLFDAEEFNRRVEDTLYRNDILISRKPEIKTGQLYKETIYSHNDAKIKSGIKISKTLPVEKYGFYTNIEYSYLVLVKVKEKNYMFGIPIMYDNKIDKAKYIEEKLKVSIDDYEIICDRIPFYTKINYHGHLAYLTGSIEFWNAYQLKISKKSMKKWKYMLNFALNDKKIPVIDNQEVLTEQEVNKQMLEFIKYLLSLHELFPLYNNTFKKLEKIDIENLDMEKKKILIKELLKMLSASSMNANLKEFGLTDREGRVHKSNIGEGTLIYNSITGIREKTIVIEGKRK

SEQ ID NO: 78 - protein, 1346 aa, unidentified
  REGION 1..1346: note = Synthetic sequence or unknown origin
MEKDYYLGLDLGTGSVGWAVTNANYEVLRAHGKALWGVRLFDTANTAEERRIFRTSRRRLDRRNRRIELLQELFSEEINQIDAGFYLRMKESKYMPEDKRDSNGECPQLPYALFIDKDFNDKDYHKQFPTIYHLRYWLMTTEETPDIRLVYLALHHMMKHRGHFLLSGDIESVREFKNTFSQFIQCLQDEELDFNLEISDDKYVMIENLLKNHTMTKSAKKTQLIKLLGAHTPCEKAVLNMISGGTVKLSDLFTDAEYDNLERSKLSFSESTYDDYSGTLESDLEEHFIVIEKAKMVYDWSVLVDILGDYQSISEAKIAIYEKHKKDLEYLKKLVKEKFDAKRYRDIFVITDEKTANYCAYIGMTKKNGKKIALEGKQCSKSDFYQYLRKNVLNELGDDADAQYLKNELDKETFLPKQVTKDNSVIPYQVHLYELNQILDNLSPRLPILQKTGEKIRQIFTFRIPYYVGPLNGITQNGQRTNWAVRKNTENGKAEKIYPWNFDEVIDIEASAEQFIRRMTNKCTYLIHEDVLPKYSLLYSKYVVLNELNNLRLDGEPIDVALKQEIYNNVFEKYRKVTQKKLKDYLVREGHLSREKAAKLDITGIDGDFKGSLTAYHDFKEKLTGCNLSQTDKENIILNITLFGEDKKLLKQRLSALYPQFTDKQKAALCSLQYSGWGRLSKTFLEGIAAPAPETGEAWTIIRTMWETNDNLMQVLSEKYQFAEAIEAENGKNEIQGISYELVEQLYVSPSVKRQIWQTLQIVKELCKVMEKPPKRIFVEMAREKAESKRTESRKKVLIDLYKKCKDEERTWIEELSNTQDTRFRSDKLYLYYTQKGRCMYSGEPIELENLWDNNQYDIDHIYPQSKVMDDSLDNRVLVKKTYNAEKTDVYPIRADIREKMKAFWKSLLAGGFISKEKYNRLIRSNEFEPSELAGFIQRQLVETRQSTKAVASILKQILPDTEIVYVKAKIVSNFRQDFQLPKVREMNDLHHAKDAYLNVVVGNAYYTKFTKDAVWFIRHNPGRTYNLKRMFTSCDIERNGETAWKAGENGTICIVKKTMNKNNILVTRRSYEVKGGLFDQQLMKKGKGQVPIKGNDERLKIEKYGGYNKATGTYFMLVESEDKKGNKIRTIEFVPLYLSSEIEANDSYAVRYLMQDRELRNPKILLPKIKIDSLFKVDGFYMWLSGRTGNQLIFKGANQLILSAKDAGVLKKVLKFVSRQKENKNLKLVAFDELDTADLIGLYDTFLDKIQNTVYGIRLKAQESTLIEKREEFCDLTDEDKCIVLSEILHMFQCQSGAADLKLIHGPGHAGVLVLNNNITKCKQISIINQSPTGIYEQEIDLMKL

SEQ ID NO: 79 - protein, 1347 aa, unidentified
  REGION 1..1347: note = Synthetic sequence or unknown origin
MKSYMQTAPYYIALDVGTNSVGWAATDKEYNLLRFKGNSMWGVRLFDEGQTAEERRISRTTRRRLNRRKQRLNTLYLLFKEELDKIDPDFDKRMKESYLINADKTTGTRFSLFADPDYTDKDFAREYKTMYHLRQELVKSEKPHDVRCVYLGVHHILKSRGHFLFEVGENAEENRSFAEVFDEYLIAIRDNLGVDCSVSDVSEVHNIVSDKTMKQAEKIKGIVSLISVALDELTEEKELKKQIEAFAKLIVGANVDLKNMFGDDTLKGSFKVTADVEGDDKFKDLSDKQLSVIAAAKSVYDQIKLEEIMGSSNYISDYMVSKYEEHRKDIKALKEFLKSKGRIDLYKRIFSERTKGLNNYAAYVGYEGQESNCTAENLKDFLKKELQEYKSEIPAIYDKITEGKFAPKLRTTDNGAIPSSLHKKELVKILENASAYLPFLNSKDADGLSVKDKIISLFDFKIPYYVGPLNNSSDKYWIVRSNEKITPWNFDRVVNCEETAKEFILRMTGKCTYTGDDALPLDSLLYREYTVLNEINVIKINGKPISKRIKDIIYNDLFVKSSKKVTKKAIHTHLVNLGEITKDDEITGVADTLTTSLQSYHKLRRTIEKGYSSELIEELIKSIVLFAQDKKLLKKWIKEKMPDASDEDIKYLSSLKFSGWGSLSKTLLCDIMGNLNTETGEVMSVIDVMRENSENLNQVLYNYGFEKAAKEYRENKYGSQDKISDILDSMYISPKVRRSIRQAMKIVDEIIGIKKAAPEKIFIEMARDVDGTNKKEQTKSRKEQLIELYKACEEDSAKLLEVCGEEGIERFKELYNNLENIEDSKLRQDKLYLYYTQFGRCMYSDEFIPLDELQDKNKWDIDHIFPRSRIKDDSLSNRVLVKAQLNRSKTNEYPINQDIRDKMRDKWLVLKNKKMINDTKYSRLVRSEPLTTDELSAFINRQIVETQQSTKALATILGKRCPDSKIVYSKAGNVSDFRKYYAYRSEEPYTEFIKCRDLNDLHHAKDAYLNIVVGNLYDTKFTAEFFKNIHNEEYSLNTEAMLSWPVKGAWIPESKDKTQGTILTVRKTMGKNNILYTRMPREEHGKLFNLTILKKEKDSNSGMPVKKDRSIENYGKYDKIKGAYFALVEHTEKKKRVRSLEPIFICDKTEYEKDNTAFFESKGFKDPRVIVPKIHMDSVLELNGVRYNIKGRSDDNIIYGHMCQLVLDSRAVTVIRNTTKYLQRMSKQKDKKEPTRYDGITAEDNIYLMGCLIDKIDKVKDYNKSIKCSRIILEAEKKNFENGSYTLYEQCVSISKALIGFRCNQRVSGYNGSTIRINKKVSSLSSAYLVNQSPTGLYEYKIDLLKD

SEQ ID NO: 80 - protein, 1351 aa, unidentified
  REGION 1..1351: note = Synthetic sequence or unknown origin
MNLKEIPYYVGLDCGTSSVGFAVTDKNYNLLKAKNKDMWGSHLFDEANTAEARRIQRNARKRLARRNERIKLLQSIFAEEIAKIDPTFFIRLNESSLYQEDRSKDNDQPFSLFNDKDYTDKDFKIDFPTIYHLRAALLDGSITKKDPRFVYLALHHIVKNRGHFLFPGESLASIQNIGTILQALKECSSSIFEEDLTFGSQNLIEDALKIKKKTERIETLKSLIFSNNDKRKLLIIKAIAGYSIQPKNLFENDEYDELPKLEFQKSSFEEQDLPKLEETLQEDEYKFVESLKALYDWSLLANIMAGKDSISKAKIDQYNKNKQDLTVLKKVIRKYFTKEEYEAFFHSNKEGSFSNYIGSINSKHLAKGPEHKTRKRVKRTNTDVFYAEVKKTLKKITVEDSDVNQILSDIENDNFLPLLRSFRNGVVPFQVNLAELKGILEKSEGYLPWLEKKDEDGLSAEDKIISIMKFRIPYYVGPLADPSKNRNAWLARKESGRILPWNFEKKVDVGESAERFIMRMTNKCTYLPEEDVIPKQSLLYQNFMVLNEINNLKINSEDISVEQKQTIYYKLFRKGNVTQKKIKNLAITEGWVQKGDDLILSGIDDTIKASLSSYIAFAPYLESGKLNQNEVEDIIRWLTLFSDGGDIAKRKIESTFSGKLSKDDIKAISRMKFSGWGNLSKKFLTGIDAIDPETGEYKNIIRLLWDTNYNLMEILHNPECGILEQLGNKEPIDSLNYSILGDLRISPKVKRQIWQALRITKEIEHIMGHKPEKVFIEVARYEGEKGKRTKTRKDQLLEKIKKAKDPDDNEILKSLESEDVSMITKRDRLYLYYTQLGKCMYSGEDIDLDDLLSKKYDIDHIYPYSKSNDDSLTNKVIVKSELNTEKRNDFPIKEDIRIKMNKFWKKLLEKELISSEKYHRLTRNTSLSDEDLKGFINRQIVETSQSTKALAEILKRYFGEETKIVYSKAGNVSDFRKDFDLPKSRIINHLHHAKDAYLNIVVGNTLYCKYTSAWFLKNVNFNNPYKYNVEGAWIADSNKTISLVKATMDKNTVLFTRQPEMRTGQLFDLNPKAKGSEKGMIPLKMIPKLKEQLSKNTNKEEIIKAWTDKYGGYNSLAVSHFALVRHLEKKKQVYTFVKIIVIRAQELLDKENLLKYCVEELGYKDVEIIRTKVLFNTLLSVDDFLMTITNSMNKGATLGNESAIPLILENKYVKYVKKLEKFTNAKRLDKNLLIDEKYDEISREENIELYELLLKKCKLYIMRNRPGNSTGIIERGEEVFTNLPIEQQTQTLMNILNYLSMGNGCTDFSLIGGGKANGTLTLSSTIDPSKKKVCIFDQSITGIYEERLKLE

SEQ ID NO: 81 - protein, 1353 aa, unidentified
  REGION 1..1353: note = Synthetic sequence or unknown origin
MEKYYNIALDLGTNSVGWAAIGPDYKVVKKGDKHLWGVVLFDKGESAKDRRVFRSTRRRFDRRRKRIELLRMLMAGSIGKEDPTFFRRLDSSFLCNKNKDPNSTRQYHYNIFNDTYTDKIYYKKYPTIYHLRKTLMESDEKADIRLIYLAIHHIIKYRGNFLHDEDAITISGAGVISLLEETFSALKTLSDDFLNADAEAFYRILSNKNLSKKDRQKELLTLIGNTPLSKVLVSLLLGYKVKSNEIVSAFSLSLDEDCILQFGTDDTEEQLATLSNLLNDDQIDFLNCTYKTFFENNFIDILGEGNVYVSDLMIQRYEKHKQDLKLLKNVLVQGSDEYKAMFRSPRHQKEGKKSDKENKSSNKKVKVFNYACYVKTNTKQTRYQNSCTQEEFYDYVKKVLSKFEDSANKTAILNEIEKGSFMPRINDITNAAIPYQFNKNELVAILDKQGKYYPEFYNNKDKIISLLTFKRPYSVGVLKGPFSWIDQTIDGTVYPWDFEQKVDYDIANANFIKKMLSKDPFFDDQYVLPKDSITYQKYVVLNELNNIRIKGKPLDVTLKQRLFDDLVCQKTTVSKADIIKFINVYYKGVNIVADDIKLSDDKLLGSMRTLVDFKKILGNDFTEKDIPLYDKIVESIAIFNDIKVRQKVINNLFEYKPYLRKYTVLFSKKRYSKWGRYSYRTLVEELSEETTPRSILDIMYQTQYNINEILYGKEFGFIGRTVGKQEHIIPNYENLIDSLYADASVKKTVWQAYKVVREIIEIIGNEPDHIFVETTKEDDIKKKKDSRKKLLDYLYSAIQTDVAEYNATLKEIKKQKSTVAEELFSNEKVFLYFLQMGRCMYSGTSLSLDHLSEYEVDHIIPRSLVKNDSIDNKVLVLKQENQRKKELAISFAVRKKMQPFWAFLKANKMISGYKYNNLMKDEYTDKDVAGFINRQLVETTQANSCFQQVIKTAFPDRTDYVLPIRAGLSREFRKKMVDKDPKQYGSFIKIRSLNDFHHAKDAYLAAVLGTFTTKYYRAWGNDDRIFATKKIMETMQSENEFKKLLSQRYSFILDLLENGDYEPTNSDGEPIPVDVAFENICRQMDYNDIAVFKVKERQASNAFYNMNPLKAGEGKLPLKYVKDANGNSIPLDPALYGGYSGEQDAYFVWISYDKGKKRETRLEGIPALIATQAKTNDQAINDYFVSLNLKNFSVESVPVYKNQLIKLNGQLVYIVASGEVANATQLVVDKKYHKLLKIAETKKYAESDIAQLNEDAVEFVTQYVEKLEKYYGLYKTIAEKVTEFLTTGFTSIDLDDKLTYISNLLVVTKSGSSRINMPKEWNGGSDWGRLSGKTIYKKDVHLYHSSITGYYKK

SEQ ID NO: 82 - protein, 1354 aa, unidentified
  REGION 1..1354: note = Synthetic sequence or unknown origin
MYYGGIDLGTSSVGWALTDVNYNLIRQKGKDLWGVRLFDEANTSQERRIHRVSRRRRAREVARIGMVKSYFAEAIEAVDAGFYQRLEESKYHRDEKASESKYAIFADDDFTDKEYYQKYPTIYHLRKKLLESDETQDVRLVYLAVLNLFKNRGHFLNSYIAEDGKEESFSELYSVFWNSIPEELAMVFPEVIDVQKVEEILSSKVYSRTVATEKLAEVLQVSKTNNKSSYEIVKMLCGLSGKLANIFAKEVLGEVYENKNLDFRGDSYEEIIGGLSEILPGEYIDMLECAKAVHDKGVLGSILKDYTYLSQARVAIYDKHAEDLRRLRVVVKKYCPECYDDYFRVMSIDNYSGYIGSVCSGKEKIRRGGHDAKKEAYKSFWKKTTELLSTMPEDDADVMYLKGELQKDTLLPKQKTKENSVIPNQVHLKELKKILSNVEGYLPFLKDVDESGLTVKERIIRLYQFQIPYYVGPLHINAGEEGNKWVVRKENGKVLPWNLEDKVDMAETRKAFIERMVRHCTYLSGKNVLPKGSLLYERFMVLNELNNVKVNGCKLPLEVKQQVYEELFAKGKKVTLKTFCTYLYNCGVIDKVDTEMISGIDGGFNHTLTSYARFCSVFGDKMKLYKYQKMAEELIFTATVYSNDKTLMKELIAKKYGNPEDEVYISKEQEKKILGFKWMDWGRLSKEFLELKGCSKEDGIEISLIQAMWECDCNLMEALSDKFTFGIKLLDMKEGREKLLSDFTYEDLQDSYLSAPVKRMTWQTILVLKELCHVMGEAPGKLFVEMPRTEGEKGKRTASRKQQLIELYKKCKEESHDWISEIDGYTEDQLRSKKLYLYYTQQGRCMYTGNAISLGDLLSNNGRYDIDHIYPRHFVKDDSLENNLVLVEKESNAYKSDTYPIDADTRNARYRLWKSLKDDDFISEEKYKRLTRSWEFSEEELAGFINRQIVETGQATKCVAHLLEELLPETEVVYVKAGNVSDFRREMNLLKTRSVNEFHHAQDAYLNIVVGNVYNTKFTKNPINFVVNYKKDSAKYRYHMCKMFEYDVKRDAVMAWTAGEKGSIVTVKKMMGKNTPLLTKRTYEAHGGIADQTLYSAKVANANNYIPLKAMDERMGDVTKYGGFSSVSGTYYFLVEHEKKKKVVRTIEQMPLYLKDALATSEEALRQYCVNRLGLQNPIIRLMKIPMKALVKRNGYWLRIAGRTGNQLYADNAVSMCLNLHWINYIYDMERFLEFGKTEDGKHSISYERNIQLYEEILEKHLNGIFSNKPNEIGNKLNNSHSAFEKLSIKEQVKVLLELLKATQYQNLRVEAKEIDLKMSPIKISNDVLGQDEFLLINQSVTGIYTSVIDLRTV

SEQ ID NO: 83 - protein, 1354 aa, unidentified
  REGION 1..1354: note = Synthetic sequence or unknown origin
MKKVGEYYLGLDIGTDSVGYAATDKRYELLKYKGKPMWGSHLFDPASQCAERRAFRTARRRLDRRQQRVQLADEIFAPEVLKVDPMFYIRRKASALCREDRPDMDDINSSFNDKEYKDKHFHDQYPTIHHLIMDLINNREKKFDIRLINIAVDWLVVHRGHFLSDVGTANIERVQNFDPIYEEFLAYYDIEDIEKPWDAVDAEAFGNILKEKGINRKKNDLKELLYHGTIPNDEYFMDKKELVNFLAGGKVQCNKLFRNSDFDDDLKMSISDEMEVLLPQLGDYATIVGRMAAMYDWSVLSDILSSSAYISEAKIKIYEQHSNDLKRLKRFVKKYYSSKTYFEIFRASSKDLTNYTAYSYNLKSVKDGKEYPKKKATREDFLVYLKKTLNLDNIEYDKDDQLFVEEMKERIGDGSFLPKQVNSDNRVIPYQLYYDELRRILENASRHYPFLSEKDADGYVNSEKLLSIIKFRIPYYVGPLRKDNNSFGWIERKAEGPIRPWNFEEVIDIDESEAAFIRKMTNYCTYIPGKDVLPKWSLLYTKYTVLNEINNLKSNGKGISVEAKKAIYNDLFCRFKKVTPKMIKEYLRDNGYIQKNDEISGIDVQINASLKSRQDFNDVLNQGILSEEDVERIITRNTYSEDTRRYRLWLKKEYPKLNDDVMRRIGKLKYTDFGRLSGFFLSELVGASKETGESGTIMYFLWNTNENLMQLLSDRYTFSDEIEQIRNNYYAENKLGINEQMESLGISNAVKRPVVRTLAVVDDVVSTLGKVPEKIFVEMARGEDEKKQRTVSRKEQILNLYRQVEEDTRLLEKQLEDMGETANNSLQSDALFLYYMQLGKCMYSGEAIDLSQIKKDKYNIDHIYPQSFVKDDSILNNRVLVLSKINGDKKDVYPIDKSIREKMQPFWKMLCEKGLITKEKYNRLTRGTPFTDEEKMGFINRQLVETRQSMKAVTQLLKNRYPDTEIVYVKARLASDFKKDFDLAPKSRIINDLHHAKDAYLNVVAGNVYHEKFTKKWFRITDTYSMKTKVIFANDLERNGEVIWNHKKDLETVKKTYERNNIHLTKYAYSQKGGLFDQMPVKKGSGQVCLKKGMDISKYGGYNKPTASFFVIAKYLKGGKKEVSFVPVDLMVSERFLADYKFACEYIKDVLAGMNTKKIENVELPFRNRVVKIKSTLCLDGVKVWVNGKANGGKIVLLSLAESAYYDNDSVYYIGKIERYVEKKKTNRRLQHDEQYDELSEEKNLRLYDILIEKMHTKQFANMPGNQCSVLKEGRELFIKNDFDSQIQILVNCVNLLKSGRAGGCDLKAIGGKNASGVMTLGANISSSKYKDIRIIDYSPAGLHLNESVNLMEL

SEQ ID NO: 84 - protein, 1354 aa, unidentified
  REGION 1..1354: note = Synthetic sequence or unknown origin
MIKDYYLGLDMGTNSVGWAATDAEYNLIRKSGKDLWGVREFDEAETSAERRTHRVNRRRLQREQARVGLLKGFFADAIKKVDPNFYQRLENSKYFQEDKDAEVNGPNGIFDDKNYRDADYYKQYPTIFHLRKELIQNANAPYDPRLVFLAILNMYRHRGHFLNVGLSGDGNEITIEEAYSSLLNAVQDYFGLSLPEGKAKDFEKVLSDKNLSRTGKYEKMAEICSTQKTDKIKAAILKCICGLKVDAKQIFTEFESEEKVEIEFSRYTEESSLILNEKLGDDYFEFIEIMHQIYDLGSLVNILKGETYLSYARVEEYAKHHKDIQVLKALYRKYKTKDEYDEMFRSDTKGTYSAYVNSYNTEKYNINGKPVRRNMKERSKDDLYKTIKSALKDIKDKDVDYVLEEMEREAFLPKQLTAGNGVIPNQVHARELKAILKNASKYLGFLNEKDESGLTVAEKISAIFSFQIPYYIGPVSEKSEANGGNGWVIRKEKGMVLPWNIEEKIDSEKTSQRFIERLVNNCTYMSGEKVLPKGSLLFEKYCVLNEINNIRIDGERISVELKQKLYNELFITGKKVTRSKIEKFFVSEGVIKEKEQISGIDNQINNSLSSYGKLMDILGDDIKTDKGKKLAEDIIYLATIYGDARKMLKDSLKKKYGDILSENQIKRISGLRFKDWGSLSKEFLEMKAWDKNTGEEVSLIGELWDSNNNMMELINSPDYTFKAVLQEKQTKLTKVLSDFTVEDLQEYYFSAPVKRMIWQTLGIIKELEKILGCAPKRIFIEMTRTDEEKGDKGRKDSRAKTLLELYKNLKDESRDWKKEIEEADKDGKLKIKKLYLYYIQNGRCMYTGEPIDLDDLFNDNLYDIDHIYPRHYVKDDNLGNNMVLVKKTCNAYKSDDYPLPAMKPDVYELWKRLFRTGFINEEKYKRLTGKQPFTDEQKAGFIARQLVETGQGTKGVADLLKQLLPDTTIVYSKGRNVSDFRNQYKLLKSRIVNDFHHAQDAYLNIVVGNVYYVKFTQDPLNYMRKLEKEKKAFSYHLGKMFEKNITIGNENAWVASEKNGESGTIVTVKKVMARNTPMITRLNFENHGRFSKETLYSARVAKKDNYVPLKMNDAKMSDVTKYGGFTNVYGAYFFLVEHEEKGKKVKTLETVPVYLAEKIARGNGALVKYCIEDLGLVNPRICLEKIKIQSLLKIDGFWYHLSGKTGNRIVLRNAVSLCLSQSWINYIHAIEKYNESKRIPDEIKREKNIELIETLAEKHIEGIYKKRQNPISELIKNAKEVIESLSLVEQCNLIIELLKLSCIGLTSADLRCIKGAEKSGVMLFSKGISKANEFKIINQSITGFYENEIDLLKL

SEQ ID NO: 85 - protein, 1355 aa, unidentified
  REGION 1..1355: note = Synthetic sequence or unknown origin
MENKNYYLGLDIGTDSVGYAVTDENYNLLRFHGEHAWGVTLFDEAALCTDRRAHRTARRRLDRRKQRVDLLQELFAVEIGKVDPRFFIRLQESALYREDAGDAYSFFNDENYTDIDYHKQYPTIHHLIVDLMTSSKPHDVRLVYLACAWLVAHRGHFLSDVNKENISELTDFTKVYDNLLAYFAENELPAPWGDCDRAAFADVLKRKTGLSYKQKLLAGILYADGKLPKTAEDDPYAKDVLIKAICGSKVKCSDLFNNTEYEELDTNGFCLGADEETLAGVMANLSDADADLFARLKATYDWAVLVDALNGQDCISLSKVAVYDQHKKDLATLKYFIRKYANEKYAEVFRKSAETNYVAYSYHNKNKNITLPKKKANKEDFCKYVKGIIAAFKGKVEEKDAAAYADMVDRLDLLTFLPKQRDTDNRVIPYQLYWYELKKIMEKAGTYLPFLSASDADGIRTDEKIMDVFTFRVPYFVGPLNKHSNRGWIERQPGKIYPWNFEKMVDLDKCEEAFIKKLINYCTYIPGEKVLPKESLTYAKFMVLNEINNLKIDEQPISVELKQIIYYELFCKKRRVTRKALEEYLLSNNHMAKGQHVSGIDEQIKSSLKAYHDFKRLLANKVLTEEQVEAIIERITYVENPARVRAWLKKNYAFLSDADVTYIAKLKYKDFGRLSYAYLNGLEGCETDSATGEAATILSAMWNTNNNQMELMSDRFTYRQSVLDLQEQYYATHSKTLAERLDDMYLSNAVKRPVIRALEITKDVVKAFGGAPAKVFVEMTRGATEDQKNKRTKTRLQQLRELYEKCKQDARDLNAQLDAMGDNADNCLQSDALFLYYLQIGKCLYTGNTIDITALKSGRYNIEHIYPQSLVKDDSIINNEILVESNANGAKSDSYPVAVDIQNKQGALWSMLHHAGLMSDEKYKRLTRTTPFSADEKMGFINRQLTETSQSTKAVATLLKELYHTEIVYVKARLTSEFRQEYGLLKSRTVNDLHHAKDAYLNIVTGNVYSMRFTKQFFRIDEQYSLNTWALFGHSVICGGKTVWTPAMLDTVKKTAVMDTAHLTRYAYCKHGPLFDLMPLKAGQGQIEQKAGKSVEKYGGYNKAAISFCLIVGYKTDKAKDVMIMPVELLFADRVLASADFAATYAQDKIGRMLNKPVHDITFPCGMRMIRINTVFALDGFRGYYTGITATNWCFSSFMPLSLKGEWQNYIKHLESFAEKTKKNPGLTYQKTYDKISCEKNIELYDVLCDKLANSIYQKRPGNPVDTIGKGKSKFATLDVKVQVQQLLSLLQVFGPTSGGIDLTQIGGAAKAATTRIGLSITTLSHSFTHSIVIIDQSPSGLWESQSINLLDLIK

SEQ ID NO: 86 - protein, 1356 aa, unidentified
  REGION 1..1356: note = Synthetic sequence or unknown origin
MKQQEYYLGLDCGTDSVGYAVTDTEYHPLRFKGEPMMGITTFDAASLSADRRANRTNRRRLHRRQQRVQLLQEVFAQVITEVDPRFFTRLRESALWREDKSDPSDPYALFSDNGFTDKEYHKKYPTIHHLICDLMQSTQKHDVRLVYLACAWLVAHRGHFLSPVKEDNIREAVDIAIPYQTLMDWFDEVKPWDADPAAFGSVLKKRRSVRDKEKEFYALLYEGKKPSDLFSDPDDPDAFAVSRVMMLRLLCGGKVAPKDLFPYKTDKYAELSSFSLGGKEEELEEILLRLEEDGELVIRLKALYDWAVLSDVLRGETSISAAKVKTYEQHKQDLKWLKAFIKKYVPDQYDKVFTAEQEGNYPAYTDHPSDGKTGTKNASKAEFSDFLKKIVKDIPVDETDRQKYDDMIARLDANTFLPKQKDTDNRVIPYQLYAVELRDVLKHASAYLPFLSEKDENGRSAADKIAQIFRFRIPYFVGPLNRNSDRAWLSRKEGRITPWNFTEMVDLDASENAFIRNMTGHCTYLPGEPVVPANALCYAKFTVLNELNTLKINSAPITVAQKQAIYNDVFCKYKKPTVKALRNYCICEGFMPADGILSGIDIEGGIKSTLAPFFSFRNLMESGMLSEEQVERIIERITCTEDQIRLRRWIDAQFPQLSEEDRRYISRLKFKDFGRMSHRFLCELQGVNKQTGEVCTVLQAMWETNDNLMQIVESDQYTFADVIREEQREYYRGQPSSLDKRMDELYLSNAVRRPIYRTLDIVKDVVKATGHAPKKIFVEMARGGTEETKGKRTQSRRSQLLELYKNCSEAEARELAALLESKTDNELQSEKLYLYFMQLGRCMYSGKPIDLEHLNDNKYYDVDHIYPQCRVKDDSVLNNKVLVLSKYNGDKSDTYPVPSEWRQTMYGYWKMLRENNLITEEKFRRLTRATPFTDAEKYGFIDRQLVETRQSTKAITTLLQERYPDTEIVYVKAGLVSEFRHEYDLLKSRTVNDLHHAKDAYLNIVVGNIYHERFNKNYFRIDQEYSLNTRQVFGRPVYVNGTCCWKGESDLGRIKDIVRKNHIHVTRYAFCRRGQFFDQMPLKASGDGELLPRKKDLPAERYGGYRKPTASFFVLAKYFAGKKSDIMIAPVELLREKEFEKDPKVTAKEAVEKVLGKAVDRIELPIGARKLKVNTVFSVDGFRFALAGKSGGGRQLGISPLAALTIDADSEFYLKRLESFTNKKAKNKELKIQQAYDKISAEENIKIYDLFQSKLSTYPFSKRPANIFDAVEKGKERFESLPLEDQVTVLEQILLSFGRSGGGSDLKLIGGVAKAGVPMLSSALSNWKKNYTDVRIIDQSASGLFEKQSVNLSELL

SEQ ID NO: 87 - protein, 1356 aa, unidentified
  REGION 1..1356: note = Synthetic sequence or unknown origin
MGRDYYLGLDMGTSSVGWAVTDEKYNLLRAKGKDLWGIREFEEAEGGIARRQNRISRRRRQREQVRIGLLKSYFAEEIEKVDPDFLQRLENSKYHLSDKDEKVRYKSAIFNDPEYTDKDYYRDYPTIFHLRAELIHNQEPHDIRLVYLALLNMFKHRGHFLNASLSAEEETQSMSDAYTAFRALVEEVMTANETENLFFPDGKADEIEAIISSRDYNRKRKSELMTEMLGFTKKDKAAQALIKGMCGLTVDVKTVFREIESEAKLSISFSDSNYDEKIVEIQEVLDDEQLELLEAVKTIYDIGSLAGVLKGEKYLSDARITDYNKHKEDLALLKKIIRKYTDQKTYNDLFRGTEPGSYSAYVNSTNSGKKQRRNMGGNAKRNQEAFYASLKKLLNKLPSEDDDVQKILADIDKELFLPKQLTFANGVIPNQVHAREMKAILNNAEQYLPFLTEKDESGLTVSERILKLFSFQIPYYVGPVTTKSSRDGGNGWVVRKESGQVLPWNIEDKIDMDATSKKFIENLIRECTYIAGEKVLPKGSLLYERYCVLNEINNIKIDGRPIDVELKQKIFEDKFMSGKKVTRKQLVTYLHGKGVLEDDAQLTGIDKTINNSLSSYGKFLGVFGDELKKDSCQIMVEDIIRDCTIYGDSKKRLRETLQKKYVDNNNLSESQLKRILGFKFKDWGRMSKEFLEMQGINRETGEVMSLVQAMWETNLNLMELIYSEDFTFAEALQEKQAKDYLTLSEFKFEDLDEYYFSAPVKRMVWQTLLIIKELEKVLGAPPKKVFIEMTRSDGVKGDRGRTISRKKQFEDLYKKIKDESQDWASIIDNADASGKLRSKKMYLYLTQMGKCMYTGKPIDLDDLFDDNKYDIDHIYPRHYVKDDNLGNNLVLVEKKANASKGDRYPLDTDIRGKMHGTWKFLKEKGLITEEKYRRLTGSNPFSEEQQADFIARQLVQTSQGTKGVADLLKQLLPDAKIAYSKASNVSDFRRDYDLPKSRLINDFHHANDAYLNIVVGNAYLVKFTQNPLNYIRSGDVQYNLGRMFEKDIVRNGEVAWLADDGKGNHGTIVTVKKVMARNTPMMTRMVLNGHGAIANATLYPASKASADNYIPLKGSDSKIADVTKYGGFTSVSTSRFVLVEHLVKKERIRTLEALPILVANSCKTMEDIENYCEEELGLIAPKVKLDGIKIQSLLKINGFYVHLSGKTNKQLALRNAVNLCLDAKWKEYIHYLEKASNNGNYGNPICSDMNIELYSILAEKHSSSIFAKRPNPVGTKLVKEKETFSKLELVDQVSVLLQILQLSAIGITQADLRAIGGAGIAGKMLISKDISKQEEALLIMQSPTGLYESTIDLKTI

SEQ ID NO: 88 - protein, 1357 aa, unidentified
  REGION 1..1357: note = Synthetic sequence or unknown origin
MQGYYLGLDMGTNSVGWAVTDYEYRLLRFKGKDMWGIREFDEAKPAVERRRHRTNRRRQQRKMVRLGLIKSYFADEISKIDPLFFNRLDNSKYFLEDKDEQVRCKNAIFNDINYTDKDYYAQYPTVFHLRKELIENKEPHDVRLVYLAISNMFKHRGNFLISGLGIDRDDETIGEAYLKVADMLSEEFDVEFDKKIDLSFFEKTLSSREYSRTKKSELICDILQVKNSEKQKKAFVKCLCGLNVKISDIIGENGIELSDEDKKTAFSFNDNDYDVKIIEIEQKIGENKTTVIAKLKEIHDKALLSEIMKGKPYLSYARVADYEKHAYDLKILKRVIKKYFSNQEYDNLFRSEENGTYSAYVNSYNSGNKSRRNYKERKQEDLYKNIKSLMKSLGDNDDIDVQYIKDEIDRENFLPKQLTFKNGVIPNQVHANELKAILNNAQEYLTFLNEKDESGYTVSERIQQLFSFQIPYYVGPVSSDSNGWVVRKEEGPVLPWNIKEKIDLKKTSEEFIGRMVRNCTYISGERVLPKASLLYEKYRVLNEINNLRIDGERISVELKQDIFNTLFLKGKRVTRKQIFNYLHSRGMAQEDAQISGIDVTVNNSLSTYGKFLPIFGEHLKEDSYKKMAENIVFWCTVYGDSKKFLKEQLEEKYADKLDEAQIKRILGMKFNDWGNLSKEFFELSGCNKSTGEVMPLINALWENNLNMIELLNSDEFTYKESLAEKQNVAIKSLSEYTIDDLNEEYFSAPVKRMIWQTLMIIKEIEKIMKASPDRVFIEMTRKDGEKGDKGRKNSRKDKLIALYKQIRSEDSAWKKEMSSRIEKYDENGSLRSKKLYLYFTQKGLDMYTGKPIDIDDLMSANSKYDIDHIYPRHFVKDDNINNNLVLASKTANSEKSDIYPIKDTIYQKMKSTWKLLKDENLITEEKYRRLVGREPFTDEQKAGFIARQLVETSQGTKGVADLLNMLLPDSKIVYSKADNVSEFRHKYEIPKSRLINDYHHANDAYLNIVVGNVYYTKFTQNPINFIKKEYSSGDRKFEYNLSKMFEWDVVRGDKVAWVAEKDRKHGTIVTVKKMINKNTPILTRMPVEGHGGLADATLYSHKKAKSDTYIPLKATDAKLQDVTKYGGFSSVATAYIFLVEHELKGKKVRTLETVPLYMKAELESSVERLEQYCRDTLGLINPSVRIKKIKLQSLIKLNGYYMQISGKTDKQFGMRNCVQLCLKKEWIEYVHKLEKFQSYGVIDDIISEQNNIKLYDELCEKHRNGIYNKKPNYMGDKLLNGKNEFVKLNKNEQIKVLIQIIKLTVVGLVEGDLTLIKESSKSGTLKISKNITNAKEFELINQSITGLYENRIDLLRV

SEQ ID NO: 89 - protein, 1358 aa, unidentified
  REGION 1..1358: note = Synthetic sequence or unknown origin
MQNGYYLGLDIGTDSVGYAVTDQEYNLKKYKGEPMWGVHLFEGGKDAAERRAHRTYRRRIDRVQQRVDLVGELFAEEIGKIDPDFFIRRKESALFAEDTKHGVKIFRGNGITDKEYHLRYPTIHHLILDLMTSDQPHDIRLVYMACAWLVAHRGHFLFDFAPDQTEKLLDFDKTFEEFLDYFSQDVARPWSAEIKAGDLLSILSMQTGVSKKKDAFKQKIYGGKKVSKEATEEFPYSCDAIMTLLCGGKVKPEALFTDPSMADIDSVSLLMGDEDFDRIVSELGDNGELLCKMRAMQNCARLITTMSNKRPQDPTCISSSKIAIYEQHKKDLEALKRFVRKYCKNQYAKIFRLVESGNYVAYSKNLKSVADPKKFKSANKEVFSDFLLKIVKNIKVRKEDAAMYTDMVERLEARTFLPKQKDGDNRVIPQQLYRQEMAAILAKAEKYIPMLSKPDADGMTVTQKLLSIFDFRIPYYVGPLVRHPQGTAWIERKQGRILPWNFEEMVDLDASEQGFIKKMTNDCTYLPGQKVLPVNSLLYGKFTVLNELNNLKVDGVSIPVKVKQELYESLFMQKPRVTVKQIRDHLLTHGYMTVGSELTGIDTTFKAGLKSYHVFRNLLESGVLNEAEVESIIEHAAYTEDKSRMRHWLKQTFPQIPEGDVAYILKQDLKQFGRLSPMLLAGLYGSAKNSDGEAFTIIEALWNTNENLMQLLSDRYTFSEQIREYTKEYYAEHPASLTRRLEDMYISGPVKRPIFRTLDIISDVVKATGKAPEKIFIEMARGGTEDQKGKRTKSRKDQLLDLYKLIKTEDARIFEKELKNMGETADNRLQERKLFLYYLQMGKCAYTGEPIDVNKLGSGDYNLDHIYPQSYVKDDSLFNNLVLVKSEANGIKGDSYPVPEQFRNTMYQTWQYWKDKGLMTDEKFSRLTRKVPFSDHEKQGFINRQLVETRQSTKAIATLLKERFPDTAIVYVKAGMVSEFRQEFDLPKSRTVNDLHHAKDAYLNVVVGNVYHERFSDRWFRIDEHYNVQLKKIFDRAQRHGSTIYWNGEADIAKVKKTAGKNAIHMTRYAFLRKGGLFDQQPVRKAKGLVSLKHGMATEKYGGYNKPSVCGYVLAKYTAEGKTEIMFVPVDLRMKDQATQNIEALATYTIHEIGKITNQEPEKVELLLDGRMLKINTAIMADGVRMALAGKDSGGANVLLSPVMALTLSKKWEAYIKALESFDKKRTVNRNIVLNQDHDGISAPDNLELYRLLIQKMKAWPFCNYPGNQVEVIETGEKIFTKAAIADQVTCLLNILQLMGPGSGGIDLSVCGGKKSVGSKRRSAKLSNWKKYYKEVRIVDVSASGLYEKISENLLEML

SEQ ID NO: 90 - protein, 1360 aa, unidentified
  REGION 1..1360: note = Synthetic sequence or unknown origin
MGAYYLGLDIGTDSVGYAVTDPAYSLRKFKGEPMWGTHLFEGGQESADRRLHRTNRRRIDRRQQRVALVNELFAEEIRRIDPNFFVRRKESALFPEDTAHGVRLFDGGGITDREYHRRYPTIHHLILELMTSNEPHDVRLVYLACAWLVAHRGHFLFDFGADQTDRLLNFGEVYGSFRDYLQEQGYSMPWPDAVSADTVLEILQMDAGVGKKKEAFKIRVFGGKKPAKEGTEDFPYSPEGIVGLLSGGKVKPRDLFDKEAYEQMESVSLDMGDEEFDRIVSELGDDGELLRQLRSLHSCAKLIATMSNCREGDPVCISSSKVAIYERHQKDLELLKRLVRNYCPKQYNEIFRRAVADNYVAYSGNVQSCSENDKKKVKRINKVGFSEYLKKKLKGLKVEPADKAEYDSMMNRLEHYSFLPRQRDTDNRVIPQQLYRQELAAILERAEGYLPMLREKNADGLSVSEKLLSIFDFRIPYYVGPLVRHPNSTAWIERKQGKILPWNFEQMVDLDASEQKFIDKMLNKCTYLPGEDVMPVNSLLYERFTVLNALNNLKVNGREIPVAVKQELYTQLFQELPRVPVKRIREYLLQHGYMAKDEELTGLDSTFKSGLRSHHIFKRLLGSGALTEAQVEEIILHRAYTEDKSRMGRWLRSTYPQLTDGDVQYILKQKLKEFGRLSRKLLTGLYGTERDSYGDAYSIMEMLWNSNCNLMQLLSEKYTYAEQISEYCKEYYSEHPRRLTDRLSEMYVSNAAKRPIFRALDIVSDVVKATGEAPAKIFVEMARGGTPDQKGKRTDSRKKQLLDCYKKVKDEDVSQFVKALENMGAEVDDRLQDRKLYLYYLQLGRCAYTGRPIELSRLADGSYNLEHIYPQSLVKDDSLLNNLVLVESEVNGQKSDAYPVDGDIRKKMGAFWSMLKQNGLMTEEKYRRLTRPHPFTADEKLGFINRQLVETRQSTKVIAALLKERFPKTEIVYVKAGLVSEFRQEFGLLKCRSVNDLHHAKDAYLNIVVGNVYHERFTSKWFRLEEHYNVQVKKLFAKPHSHGGECYWNGEADIARVRKNMAKNAVHLTRYAFIRKGGLFDQQPVKAAEGLVELKKGLLTEKYGGYNKATASCFMLVRFELKGKREVMLVPVELLVKDRVLDDRTFAQQYAAQTVEKIIGKKPENLELLLNGRPLKINTVFSFDGTKMVLASKDNGGKNVMLSPLVALMLAPEWEQYAKRLESFQNKQKNNKNLQPNEVRDGITGEKNATLYRILAKKMGEWPFKQFPGNQQENLERGGEVFESKEITEQITCLMNILTLMGPGSAGVDLRGCGGTGQAGKKSANAKISNWKSRYSDVRIIDESASGLFSKTSGNLLDLL

SEQ ID NO: 91 - protein, 1361 aa, unidentified
  REGION 1..1361: note = Synthetic sequence or unknown origin
MAKKLFPNYYLGLDCGTGSIGWAVTDLNYNILRFNGKAMWGIRLFETADSATDRRVVRCNRRRNQRRTQRIDWLQELFAAEIAKIDPTFFLRLNESRYHIEDKTERQPNALFNDFNYKDKDFFKRYPTIFHLRKELIDGTASYDIRHVYLAIHHILKNRGHFLFPGEDMASVKNVTPLFEQVKRLLVDAFDVEFNYADIVEIETALRQRKAASRKESLQRLLAASDDVLLKAMIDTMTGYKISLSKMFQDENLANAEITSINFSEGTFEDNTELLQTILNSDQFELLTVLKGIYDWSLLANIMEGFQYISYAKVNRFVANKEELCKLKRLIKTYAPDKYDSFFYDTDKPYLSAYVGSYKSNGKKTAVNRCSAEDFNKAVVKILEGMPDTVKEEPDYTLLLGKAKDLTLLPLLISSNNSVLPHQIHLIELKAILKQSERHHPFLAQKDAKGLSVSEKIINILSYRIPYYVGPITDFHDDKINPNKFAWMTRKKTGRIYPWNFDEKIDIEKSAEKFISRMTNKCTYLQDKDVLPKNSLLYSKFTVLNELNNLRINETPISIEQKQAIFDDLFKTHRKVTNKKLHDYLITQGWYNKNQELIITGIDSNFANSLGSYIDFKDFIETKVLTRTDVENIIRWITLFGADRKLLKKRVKATMGQKLSDQQIDTIINKFHYKDWGRLSKEFLTDIFHMEKSTGEVKSIITMMWETNNNLMELMSPSFDYAGQISNNAPIEKLDYSVVEQLSTSPSVKRQIWQTLLIVKEIQKIMGHVPKKVFFEFARGEEKKKRTVSRKNKLKELYSNIKSPDTEAKELLQFLDATTDSQLRSDKLYLYYTQIGKCMYSGDRIDITDLYNTNIYDIDHIYPQSKTKDDSLDNRVLVKKEINGHKSNVYPIEDSIRIKQHAFWKTLYDKNYISKEKFERLTRNHPLTDEELANFISRQLVETRQSTKIAANVLSRFFGDSTKIVYSKARNVSDFRNEFDLTKCRTVNDFHHAKDAFLNIVVGNVYDTKFTGNPLNFIKSKTLYNLTTKKLFMDRVEKAWEPQGENSTLQLVKHTLQKNNILFTRQQIERGGSFFDAQVVKGGSYQGLLPTKMADKKLQRALQNTQKNRKEIITEWTDKYGGYNKLSVAYFILVKHKKGKKEVVSFEPMLNLYKAFCKTEASLENYCTKELELVEPHIILKKVLINTLFKIDGFPMHLAGKAGEKVKVRPAVQLCLSKEDEAYIKRLSNYNDRRLKQKVKELQIEPQYDHISCEQNMILYQHLVQKSNEPIYIKRPAGQSKLLEMATPLFEQLSIEQQSLLLLQIVKYFSCTGDTVDLKLLGGSAQAGFTLIPKTLPNTKIALFINQSPTGLFEQEVPISL

SEQ ID NO: 92 - protein, 1363 aa, unidentified
  REGION 1..1363: note = Synthetic sequence or unknown origin
MRKNKYGDYYLGLDMGTSSVGWAVTDTNYNILKFNAKALWGIRLFEEAKSAAGTRLYRSQRRRIDRVSWRISILQELFSEVIAKVDPGFFMRLKESRLRLEDKKVPLKYNLFIDKNYTDIDFYKQYPTMYHLRYALATREECFDVRLLYLAIQHIAKHRGHFLFAGLDASPITDFRNIYDKLEEYIKEELELADWSCQNIDKMEEVLSNSNLNVTAKKKELEKLLPRDNKKCKALISFLSGGKAKMSELFDDENLKLCEKDSFGFRDDDFETIMPIIEADLGDRIEGIFLLKSIYDWSILAKILGINGQIQNQKYKFISSSKVDVYNQHREDLVTLKKILKGSVQYNKIFRMKKEGSYAYYISGKQSQEDFCKTLQKIVTNDQLLKRKSEQVTSFEQVKDAEDGLLYRIANGLAFPKQVTKENGIIPIQVNLVELDAILQNAEKYLPFLSEVDADGLTISDKIKAIVKFRIPYYVGPLAGSKYSKEKGRCWVVRKNEKIYPWNFDKVVDLEACAEKFIINMTAKCTYLLGEDVLPKNSLLYSEFMMRNELNSLTIDGERVSSELLNKIYNHFTTKNKITKKNIKEYLKTENIYCEDIGGIDDVVKSNLKSFKDFSRIFGQDYVVCHTKQIEDIIRWITLFCDEKDLLRKKIISEYPEISAEKLEEIKKLKYKDWGRLSAALLNGEKIAYIDDSTGEVITIISALRHTNKNFMELLSNSCEYKFIDKIQKFNKSDVNTSENITYKDVEKLYVSPAVKRSIWQTLSIIKELQLILGHAPKKVFLEMAREKQESQRTISRLNRLKELYKECKDEEIFLSSSLEEKTDEDLRRDKLYLYYTQLGRCMYTGERIEISDLFNDNLYDIDHIYPRSKTKDDSIDNRVLVRKNMNSKKSDKYPLNENIRSKMRAFWKDLYERGYISQKKYERLIRVNPLTDDELAGFINRQIVETRQSTKAVAELLQSYFGSDNVIFSKAGNVSDFRQKYGFIKSRDVNDLHHAKDAYLNIVVGNAYYTKFTKSPINYIKNNHDFKYSLNPDKFYNFPIERAGVIAWVPGEDGTIAIVKKMMSKNNILFTRMAVQGKGQIFDQNPVAKAKDKWPLKQGLPTEVYGGYNSLTTSYFALVESLGKKGKKQRSLEAVPIIFADKQKNVIEKYLSTNSNLVNPKIILPKIRKFSLLYVNGYPMHIASCTGKQITFYSARQLILPDDEVTYVKSIFNCEEKIQYNESIIYDLQKDETSKQIAKKRLQYYEDRFGISRVRNLKLYQLLVAKCADKSFYNRPASQYENLKNNEDVFASLKLFEQIKVLEQIFKLFKCGSASANLKLLGLGAYCGIPKIGMTLKDKTQIILVNQSVTGVFEQAIDLLSV

SEQ ID NO: 93 - protein, 1363 aa, unidentified
  REGION 1..1363: note = Synthetic sequence or unknown origin
MENTEYYLGLDMGTSSVGWAVTDTHYRLLRAKGKDMWGIREFDRADTSVDRRTHRISRRRRQRELARIGMLKDYFHDAISNVDPYFYQRLDNSKYYVEDKEENVRNKNGIFHDENYSDVDYYNEYPTIFHLRKELIENSQPHDVRLVYLALLNMFKHRGHFLNAGLSQGTDTQSMESAYQQLLMLLETTFIDNQDLVVFPDAPDYRTIEDILSNRDYSRTRKSEELAAFFKIEKKDKTAFAYVKAICGLKVDAKLLFPNIEDEEKKIDICFSEYGFEDKIQEISDAVGEENYQIVEALKAIYDIGSLAGIMKGYSYLSEARVAEYEKHKSDLARLKSVIRKYKTPEEYDKMFRQKEPGSYSAYVNSVNADGQQVFGRRNMKERKREDLYKTIRQLLKDVPQNEDVTYILNEIEKENFLPKQLTASNGIIPNQVHTREMAKILQNAENYLPFLNEKDESGLTVSQRILKLFTFQIPYYVGPVSPKSEQNGGNGWVVRKADGKVLPWNINEKIDLKATSERFIERLIRNCTYISDEKVLPKASLEYEAFCVLNEINNLKIDGEKISVELKQEIYRELFQRGKKVTKKQLVNFLSCKGILKEEAQLSGIDNEINNSLSTYGKFKAIFGEKLEEDECRHMVEDIVRWCTIYGDSKSFLKEQLEERYADKISPENMKRIFGFKFKDWGRLSKEFLELSACDKSTGEKVSLIRTMWDTNYNLMELLHSENYTFDEALKEKQKKGVRLLQEMEPEDLDELYFSAPVKRMVWQTILIIREIEKVLGSSPKRLFIEMTRSDEEKGDKGRKDSRKKQLLDLYKNIKDESRDWKAEIEAADQKGWLRSKKVYLYYTQMGRCMYSGQPIDFEALMNDNIYDIDHIYPRHFVKDDNINNNLVLVDKRLNAHKSDTYPLEASIRFSTANIALWKRLLDVGLILPEKYRRLTGREAFTDEQKAGFIARQLVETSQGTKGVSDILKEMLPETEIVYSKASNVSEFRHQRGLQKSRLVNDFHHAHDAYLNIVVGNVYYVKFTKNPINFIRNEYARDAKTFNYNLSKMFDRDVARGEEIAWKAQTEEGAGTIVTVKKMLAKNTPLLTRFSFEGHGAIANETLYGASKAKKDGYIPLKSSDQRMLDVTKYGGFTSASTAYFFLVEHEVKGKNVRTLETVPVYEKDKIAQEPEELQRYCEQTLGLIHPSVRISRIKIQSLMRINGYNVHISGRTGNRITVRNAVSMCLGQNWIDYIHLLEKYREKQDMDEKITAAENIRLYDILTEKHTKAIYQKRLNPIGKKLIDAREKFEQLTVEKQSLVLLQILQATQIGIAVADLTLIGETANSGVMLFGKNITAFSECKLINQSVTGLFESSVDLLTV

SEQ ID NO: 94 - protein, 1367 aa, unidentified
  REGION 1..1367: note = Synthetic sequence or unknown origin
METEKYYVGLDMGTNSVGWAVTDREYRIVRVKGKDFWGIREFEEAKTAVDRRSKRVSRRRRQRAQVRSGLVRSYFEPAVLAEDPLFYIRMDNSKFFEEDKDQVIGKNAIFDDEDYKDADYYSEYPTIYHLRKALLEDTVPHDSRYARKVYLAIHNMFKHRGHFLESGLSEKESMNSMTILYSEFVEQVDLVLDLSFPSGVAEEIKEILSDSGLSRSAKSDKIAEVCHFDKGNKKELLLIRAICGLKLDAKKVFDGLDDIEEKIEIEFSSASYEEKVEELASVLGDENFELIEIMKDIYDTGMLAKILHDYQYLSESRVALYEKHHADLKLLKEVYKEHFSEDIYDKMFRGGKEGAEDGKYSAYVNSYNTEKLNETGKPMRRTADSRTKEALYTSIKKDLKDLKDDRAEYILKQIDTDNFLPKQLTPGNGVIPNQVHRREMKAILKQAEKYLPTLREKDDSGLTTSERILKLFSFQIPYFIGPTTEKSKECGGNGWVVRKEEGQILPWNIEDKIDYQKTSEEFIKRLIRNCTYLSNEKVLPKASLIYERFCVLNEINNMKIDGEPISVELKQEIYTELFCKGKKVTRKQIENFLANRGCLSESAQLTGIDTAINNSLSSYGKFRGVFGEMLDTDEYQKIAENIIYLATVYGDSKKMLRECLQKEYQDILDEGQIKRILGFKFKDWGKMSREFLELQGCDTTTGEVKSLISAMWDTNENLMELLHSEQFTFGKELQAKQIKQLESLKDFQANDLDEFYFSAPVKRMVWQTILLIKEIIKVMGNPPEKVFIEMTRSEEEKKGDQGRKASRGKQLLELYKTVKNEERDWKKEIESADESGKLRSKKLYLYYLQMGRCMYTGEPIELDELFSTKYDIDHIYPRHYVKDDNLSNNLVLVKKESNAYKSDNYPLVEMKPEVYQLWKLLHAKKLISDEKYRRLTGKNPFTDEQKADFIARQLVETSQGTKGVADLLKQLLPEKTTVVYAKARNVSDFRRDNGFFKSRIVNDFHHAKDAYLNIVVGNVYFTKFTQNPLNFIKRELAMDQKKNHYNLGRMFDWNVERGGLVAWVARNEEKGIEGSIATVQKMMAKNTPMMTRLSFEGHGGITKETVHPSRKAKKGIYFPMKTSDERLANVERYGGYSDIATAYFFVVEHTMKKERVRTIESVPVYLSKAVENNPDKLEEYCVNVLELKEPSVRVRKIRIQSLMRYNGYEMYISGKMNGGKYYTLWNATNLCLCQEMVNYVKSLEKYGDEKIVSDNICREKNIELYNELREKHDTGVYSRRPVPISKILNDGLEKFEKLEIENQCNILLGILKLSYIGTPNADLEDIGGKKNSGKMYISKMITEKNAPVIVNQSVTGLFENTINLMTV

SEQ ID NO: 95 - protein, 1369 aa, unidentified
  REGION 1..1369: note = Synthetic sequence or unknown origin
MEQNTKKLFIGLDVGTDSVGWAATDEYFNLYRLKGKTAWGARLFLDAANAKDRRQHRVSGRRLARRKERIRLLNALFDPLLKKVDPTFLLRLESSTLQNDDPNKDQRAVSDALLFGNKKHEKAYYAAFPTIWHLRKALIENDDKAFSDIRYLYLAIHHIIKYRGNFLRQGEIKIGEFDFSCFDKLNQFFDIYFSKEDEEEVEFIGLPNENYQRFIDCAADKNLGKGKKKGDLLKLMSFSEDEKPFCEMFCSLCAGLAFSTKKLNKKDETVFEDIKVEFNGKFDDKQEEIKSVLGDAYDLVELAKFIFDYCDLKDILGASTNRLSEAFAGIYDSHKEELKALKGICREIDRSLGNESKNSLYREVFNDKGIPNNYAAFIHHETNSSRCGIADFNNYVLQKIEPLENLLSKQNYKNWIQLKQLASQGRLLQTIAIRSTSIIPMQLHLKDLKLILANAEKRDIPGIKDIKEKILLLFQFKVPYYCGPLTDRSQYSNVVLKAGTREKITPWNFADQVDLEETKKKFMEGLTNKCTYLKDCNVLPRQSLMFQEYDAWNKLNNLSINGNKPSPEEMNALFDFASKRRKTTMSDIKKFEKRATMSKENDVTVSGWNENDFIDLSSFVSLSGFFDLGEIHSADYMACEEAILLKTIFTDAPQDADPIIAEKFPNLKPNQLAALKKMSCKGWATLSREFLTLKAVDADGEVMNETLLGLMKEGKGNLMQLLHSSLYNFQDVIDSHNRAVFGDKSPKQIANDLIEEMPPQMRRPVIQALRIVREVSKVAKKQPDVISIEVTRESNDKKKKEEWSKKATDRKKQIDLFLKNLKKTEDVKQTESELDGQAINDIDSIRGKHLYLYFLQNGKDAYTGLPIDINDVLNGTKYDTDHIIPQSLMKDDSIDNLVLVNREKNQHKSNEFPLPRDIQTKANIERWRALKKAGGMSEKKFNNLTRTTPLTEEELSAFVAAQINVVNRSNVVIRDVLKILYPNAKLIFSKAQYPSQIRRDLEIPKLRDLNDTHHAVDAFLNIVSGVELTKQFGRMDVIKAAAKGDKDHSLNMTRYLERLLKKVDENKNETMTELGNHVFVTSQRHDFLLTYRFDYQDSAFYNATIYSPDKNLIPMHDGMDPERYGGYSSLNIEYNCIATIKGKKKTTRYLLGVPHLLALKFKNDGIDITSDLIKLVPHKGDEEVSIDWKNPIPLRITVKKDGVEYLLAPFNAQVMELKPVSPVFLPREAAEYLARLKKAVDQKKQFIYQNSAEIFQSKDKNNALQFGPEQSKNVALKIYALADAKKYDYCAMISKLRDAALRAEMLDSLSSEALFKQYNDLISLLSQLTRRSKKISSKYFSKSRGALLQDGLKIVSKSITGLYETERNL

SEQ ID NO: 96 - protein, 1525 aa, unidentified
  REGION 1..1525: note = Synthetic sequence or unknown origin
MKKILGLDLGTNSIGWAVVNADDELDKVTGIVAAGSRIIPMTADELKAFNSADTSKQSKCAARTQFRSIRRNIERTKLRRSRLLRVLNALGFLPEHFASQIDRYGNLIDGKEPKLAWHKDAQGKMQFLFKASFEQMVHEFHNVHPELVANNKLIPYDWTLYYLRKKALRQRITKEELAWILLSFNQKRGYYQLRGEDDDKEGERKEFMELKVLDVKPEDNPKGKGKQWFIAQLENGLVYRSTNSRLPLWQGKTKAFIVTYKLNADGTIKKDKEGNDCCSMTMPQSDDDWNLLKEKTKKDIDNSGKTVGEYIYDAILSKPDVKIRGGLVRTIERSFYKDELRQILSTQCSLHDELHNRELYDKCINVLYASNEAYRQSISGRDFVYLFLDDIIFYQRPLKSKTSLIADCPFEVRHDKDGKKIPVKCAPKSHPLFQEFRIWQFMANLRILCRECVVDGHSKTDIDVTQQYLGTETQRLKLFNYLNDRKSVKQKDLLGFIFGKNETERYRWNYVDDPDKEYPCNPTRADMLAVLKKLEKLTGTHIGLLPTWREPCGTHEGEIKETDLWHILYSVTSMSELKAALHTFAHRNNLPDEFVDEAAKIKPYERDYAAYSLKAIKKLLPLMRCGEMWSYDNIDSATRQRIENLVNGEFDETISNRVREKSIHITSPYDFKGLPQWLACYVVYNRHSEAGTDAKWKTPDDMHGFITTFKHGSLRNPVVEQVVLETLRIVADIWQQHGTIDEIHVELGREMKNPADKRKRIYQTIDANEKTNARIRYMLQDFLNPQLEIEGVSPDSPYQQELLKIYEDGAFASDSDVPKDIIEIRAKYTQNEASKRPSAKEVERYKLWLEQRYRSPYTGQTIPLSRLFTRDYEIEHVIPQSRFFDDSFSNKVICESAVNKLKDKLLGYEFVKKHHGEIVECGFDRKVNILEVDAYERLVANMYAANKAKREKLMMEDIPDTFIARQLNDSRYISRYILSLLSRIVRDDDEQESTSKHVIPVNGAITDRLKQDWGVNNKWNELILPRFERMNKITGTHDFTYVNKEGKLVPTVPIGMMKGFSKKRIDHRHHAMDAIVIACTTRSHVNLLNNESARSGNREMRYALSCKLRRKGDVVIDGVKKTVFKEFYLPWNSFPDDVLSTLQGIIVSFKSKVRIIQKSTNRYTRFVEKDGMKNKVVDWQDSSRNVTVRKSLHKDTVFGLVNIRRKKIVRIASAVDTPSMIVNKELKDIVHRLIEKYGNADRVKKHLKDNAVMYSQFDLNKVEIYEFTNATKEPMVATRADLVSKFSDISGKESKILQRIEEITDTGIQKILLAHLEANRDNLDFAFSPEGLVQMNENIALLNGGVPHKPIVKARFMEPLGMKHPKGNSGCKIAQYVEAQKGTNLFYAIYIDSNGKRIFSTIPLIESIALQEAGLSPVATQDENGNRLLFYLSPGDLVYVPTAEEIEMGMIAEEIDKNRIYKAVSFNGAQAFFIKSSVATSIIDKKEYGPLNKMERSITDEMIKAICIPIKVDRLGNIIMLNPKL

SEQ ID NO: 97 - protein, 1374 aa, unidentified
  REGION 1..1374: note = Synthetic sequence or unknown origin
MGKKYYLGLDMGTNSVGWAVVDTDYKLLRAKGKDLWGVRLFEEAHTAAERRGYRVSRRRRSREIARIGMLKEFFADAIEAKDPGFFARIEESKFHKEERNEGNKQPYAIFADTGYTDKEYYEQYPTIFHLRKELLEKKEPHDVRLVYLAISNLYKRRGHFLDATLSENEETDSMVALLDGCISKMVDLEMEVPVNVDAIELEEVLGTKGVSRKRILESLCTMWGIDKKKKSLYALASLLCGMSCKMIDLFGEEVIDEEHKRIAVSFRDSRYEEIVSELQDVLGDDRFDLICVFKEIHDKGMLSNLMKGYDFLSQARVAIYEEHKLDLLMLKKVLKKYDAKEYENMFRIMKENNYSAYVGSVNSHDKIRRGGSKNREEFLKYVKKVVSNQTVFPSDDDDVCNILQRIEDDIFMPKQLTASNGVIPNQLHLREMSKILKNAENYLEFLKERDESGLTVSEKILQVYKFQIPYYVGPIPYCMSGTDDYNNLTKYHNVWAERKELGKVCPWNFEEKIDIKKSAENFIIRMVRHCSYLAGENALPKNSMLYEKFMVLDELNNLRINGEKLTVEQKQNIYHDLFGQGKKVNMKSLANYFVRNGIIQKDQAESAVSGIDGGFRASLSTVGKFYGIFGEAVYHDENVKAIEDIVFWGAVYGNDKKMLKEKINEKYKDKFSEQELKRILGFKFEGWGRLSRSFFELEGESTEDGVCRTFIQALWETNDNHMELMSSKYTYKEELEKKLQLVEKPLKEWNFEDLDDMYMSAPVKRMVWQTISIMKELEDVLGNGPERIFVEMAREEGEKNKRTISRKQKLIDLYKAIGKEGKEWCKEVEGMEEASFKNRKLYLYYLQMGKCIYTEQNIDLHTLLTSNTIYDIDHIYPQHYIKDDSLENNLVLALKDYNNNVKKDIVPLPTETRKNRRAYWEVLKNKGFISQEKFSRLTRNIGFTEEELAGFINRQLVETRQGTKSITQILKHAYPMSEIVFAKAGAVSEFRKKFDLLKVRCINNYHHAHDAYLNIVVGNTYFVKFTKNPYNFIKEVVKNPNKVENKYHMGQVFDWNVCRNGENAWIKDKTIDTVKAVLGKNSPLVTRYATEYHGGITQKVTIYKVSPEKKDSYIPVKMRDERLKDVTKYGGLRDVAISGYSLVEYKVDDNVVRSLESIPVYLGRVESLADETIVAYCQQMLQREYKKKIVSCIRICYKFIPSESLIRYNGYYYYLGGKTDRYIWVRSAIELCIDSKKAKYIKKIEKAIKSNSFEEKGHDGKRVLSVQSNIELWSWISNKFVTGIYAKQIGTIKGIIANSEEQFISLTLEQQCYVIYEIIKYINTSDMTDVALIGGSSKSGKMRISKKITDVREIVLVHQSVTGLYRAEVNLLTV

SEQ ID NO: 98 - protein, 1380 aa, unidentified
  REGION 1..1380: note = Synthetic sequence or unknown origin
MEQNYYLGLDIGTNSVGWAVTDSSYHLCQFKHKDMWGIRLFDEAKTAQERRTARCARRRLERRKQRIDLLQELFAVEMNKVDDTFFIRLNESRLHLEDKIVPAKHPLFREENYTDREYYQEYPTIFHLRKDLIEDKAPHDIRLVYLALHHIIKNRGHFLITGGFSDAKSFAATMRNLQEAVQNEFDFELYLDETGLADFERILQSRDDAKSVKAKKLLGLFSFTHLENDEAMRKKTIVDQVCKFVCGMTGDVCKLFAMDSEESGLEKTKFSFGDAQYEESIADQLEGALPEKFYVLECMKALYDWSILADILAGEDYISFAKVKQYALHKENLKRLRVFMRKYCDKHTREQFFNAHQQEKGNTKLCNYAAYVGSVKKNGKEYSVARCSEEEFYQGLKKILEAVTVTAEDAAEKEYLLQHTQLHTLLPLQRSKDNGTVPKQIHELELNKILEQACQYLPFLNDTDGEGISVAKKIKDIFNFRIPYYVGPLSDRHRAQGANNWMIRREGRTERIYPWNFEQVVDMEQSNTAFITRMTNKCTYLVGEDVLPKHSLLYSTFMVLNAINPLKIKGYPATELQKQNIFRHVFLKHQKVTAKEIIEYLNQEDPGLKLTEDDLSGFDENGKVSMSSYLDFWKKVFGERMAENAVQAMVEDIIKWKTIYGDDKQMLKRIIQQHYPDQLTDAQLKAVAGFRYSGWGNFSKAFLNGIQGIDTETGETFTIIKALWNTNCNLMQLLSGRFTFQQQITEHNKAQIGEMTQISYENVVEPLAVSPAVKRSIWQTVQIVQEIKQIMGAAPQKIFIEMVRDDDSKGKKKGRTASRKQQLLELYAACEADVREWSQEIEGKDERAFNSLKLYLYYLQKGRCMYTGERIDLDELMKSNSKWDKDHIYPQSKIKDDSLDNLVLVNKEVNAKKSNELLSAEIVQKQRSFWENLLKEGFLSKKKYDRLTRINDFTEEELSGFISRQLVETRQSSKAVKDLLEQLYPDTAIVSVKAGLVSQFRKKDLCELKSRRLNDLHHAKDAYLNIVVGNVYYEKFTANPIRWMKENRRTNYSINRVFEYDTKKRDEWIWQAPPKNERGKVCRGEREELLGGTIDVVRETVQRNRMCYTEYTYCEKGELFAANPKHVESAKIPLKAGLEPEKYGGYYSPKSSYFALVEFDGKKKGTRIRNIIGVPIYIANMLPHRPDAFLHYCEEVKGLVNVTVLYAKIKKNALLLVDGFPLRIKGENETDIMFKQNLQLVLRQGDAETVWRIEKYLEKNKDYAVDEKFDSLSDDSMMQLYDVLTEKLQTVYSRRPANKGQTLVEKREVFAKLNGNTKAVILNEILTMLRCDTATTANLKGIEDKENAGSIKMKKSTVGKSKLVLVNQSVTGLLENRTEL

SEQ ID NO: 99 - protein, 1381 aa, unidentified
  REGION 1..1381: note = Synthetic sequence or unknown origin
MANEKNFLGLDIGSNSVGWAVTDENYKIKKYKGNLMWGVHLFDEAQQSADRRMFRTARRRLDRRQQRIVLLQELFAADILKKDENFFLRLKESALLPEDSENRKHNIFFDDENYGDKEYFNEYPTIHHLIVELMNCDSPHDIRLVYYACAYILAHRGHFLFNVEKDDIEKITEFKPLYKKFYSDLTELCETPAFDENAEIMEEVLKKHISVTAKDKELKQILFGGKVPKDIDTIKYELLTKLICGGTVKMSELFRKEEYSELEKNSICVKSADFSDTLESLERQLDELHFALIASVKAMYDWSLLVDILHGETMISKSKVEVYDQHKADLKELKYFIKTYLDKTDYNAIFRDVSDKANYVSYVYNAPSENDRNKYKKCLQEDFCKFLKPYLEKITPTDDDKERFEELKKKREDNELCPKQVTTDNRVIPYQLYYAELKKILENACKYLPFLNEKDEYGTVAEKILKIMEFRIPYYAGPLVGREKSDNAWLKRKADGRIYPWNFSELVDEDESENEFIRRMTCKCTYLAGEDVIPKYSLLYSKFMVLNEINNIKVNGELISVEAKQKLYQEKFVESKARVTKKRIREFLVSIGEYSGDVEVTGVDDTIKSSLRSYHDFKHLIDCGLLKEFDVEKIIERITVTTDTKRLKNWLKQEYPQLSASDVKYISKLKYKDYGRLSRRFLEEIIPIDADTGEVLGDNNIITALWETNSNLMQLLSMGKGYSKAIEKFNNNYFDQHPDEKSISKRLKNMYVPTAVRRSITRTLDIAKELKTILKKAPDKIFIEMARGEGDTPKGSRTKSRRDQITEYLDNSDAENIGELRERLEKTDDGRLRSEKIFLYFMQLGKCAYTEKNISFDELDDNTKWNIDHIWPQAKIKDDSIDNKVLVDSNANGAKGDKYPISSDIRSKMSGFWHALYKKNMMSEKKYQRLMRSTSFTEEELSGFIARQLVETRQSTKAVATILKEIFPESEIVYVKAGIVSEFRQEMDMMKCREINDLHHAKDAYLNIVMGNVYDTKFTKDPLNFIKSGERYSMKLFKKDQSGKKSGLLTGVVKRGDNIAWDPETSFDIVKHMMSKNSIRYVRYTYRRKGGLFNQMPERKKAGLVPRKKGLDTEKYGGYNNTTVSSFAVIKCKTDVIIIPVELKCYNQFFSDIDFAKKYSYEKLKYILPDKKYKGITKDDIVLPTIDYQNNAGIRTAELKINSIVEVNCYPISLCSKDSKGKYIIVASPVSLIVDKNSENYIKKIIGFFEKEPNRKITSYNNISKEHNLDIYDIIMHKCGEKPFNIWSKFADMADVLQKKRNIFFELSVEEQVKALKEIISILKSGRSVFCNLSYLNESKQSCISKLGAVLTGNKKIKSVVIVDQSPTGLFEKKSVNLLEL

SEQ ID NO: 100 - protein, 1381 aa, unidentified
  REGION 1..1381: note = Synthetic sequence or unknown origin
MEYYIGLDMGTNSVGWAVTDVNYNLIRKKGKDMWGIREFDEAESAAERRVHRVGRRSHQRSQVNIGLLKEIFANALAAEDENFLARLDNSFYKAEDKDENLTTLDGIFADADYHDADYYKEYPTIFHLKYDLIMDKVPNDGRYARKVYLALNNYFKRRGHFLNESLSGSDEGGKDIWTAYVELCDTVYEEFDIVLAHEYELENKFRSVFCDASLSRSRKRDMLMDLFGMTKKENAQQYMILGAICGLKTDLLKLLSIESEQKADLEFSSAGFEDKLPEIYAIIGESYANLIESMKQVYDAGVLAGIMSGVDAEGNPIAWLSQARVTSYKKHKKDLHILKECIHKYCDEKEYNHLFRENADGSYSAYVGTVNSESKVRRGEVLHASKSGERYANLAKRIKTDLEPYANDENVRYILDELKAETFLPKQLTFANGVIPNQLHEREVRRILDNASKYLPFLQEKDESGLTNSEKIIRLFTFRVPYYIGPVSQNYKGNGWAVRRAGMEKKTVYPWNMEAVINYDDTREAFITKMVRECSYIAGEKVLPKESMEYQAFMVLNTINNIKVKDEKISCELKQDIYHDIFEKNGRITKKKILTYLNQRGFSVEENELGGIDAVIGCQLSTYRRFYGVLGDDLSKDSVRHMVEDIVFKGTVYGDSKAMLKDMIAEKYSDELSKEQMKRILGFKYRDWGNLSKQFLEMEGCNKQTGEITSLIRALWEDNLNLMELLHSDKYTFADTLKEKHQKNMKSLTEFNFEDLEEMYFSSPVKRMIWQTLLIIREVTEILGCAPTKIFVEMTRSEDEKKGDAGRKDSREKELLELYKSIKDDRSWDEEIKNAGASGKLRSKKMYLYYKQMGRDMYTGLPIDLNELFDDNKYDIDHIYPRHFVKDDSIHNNLVLVDKRKNSRKSDNYPIDKSIREDGKITAYWRMLHDKKLMNDEKYRRLTGNRPFTEEQEADFIARQLVETSQATKGVNDLLKELLPKNTILVYAKAVNVSEFRKQFDFYKSRTINDFHHAHDAYLNIVVGNVYFTKFTANPLNFIKKEKKEYHLGRMFDRDVERNGYIAWKAPIYDKETKRMVEPGESLTTVRKVLATHTPLLTRLSTTQHGAISDSTICSAAKAKKDGYLPVKSLSNPKLMDVTKYGGFNSIKNAYFFLVEHEVDGKGKDKGKPVKIRTLECLPVYKRAYVESHEEGLYQYCLELGLKNPSIRMKKIKPQSLIKVDGFPLYITGKSENRFVVRNACNLVLGAQWNQYIHAIEKSNLSGRISENITVEDNVRLYDELMKKHTEDIYAKRPNSVGEILNKGRAKFVDLDVAKQVYTLTQILNLSLICNSALADLNLIGGSTKTGVARISKSVSGYKEFKLINCSVTGMFEKEVDLLKV

SEQ ID NO: 101 - protein, 1394 aa, unidentified
  REGION 1..1394: note = Synthetic sequence or unknown origin
MSKGHKNLNITKVVENGIDYDIGLDIGTGSVGWAVVSEHGVLLKRLGKNAWGSRLFESAETAADTRSKRTLRRRYDRRKQRIYNLRELIAADVAQVDPHFFAKFNQTPLIEADRGLSDRHILFNDIDYQQLFLVDPEHNIHEKKYPTIYHLRKRLVEDPCKEDIRLVYLALHHLVKYRGNFLIEGDLTAENANALQALEAFKEALIPFCEALEISFDETLFDVAALNQVFTDGSKTRRERQEAVNEFLLPCFEKESKDRVKNLSLAMFGYQTTWDKIFPFESETAQKFSLDKEDKVTAFVDEVLPEDFADVFTALEGLYNAYLLAGILKGSQGGTLSSSMVGLYQQHKTDLHMLRNIVKKYSTIEEETGRRIEFNNMFRGPRYADGMYVKNAAKGYTGYMMNKVSQEDFYKEVKNLLSGFTLTSEEAKWWEEAQKRIDDLTFLRKLRNRDNGAIPHQLHLEEMRAILKNQGQYYPTLAQNASYIEQILSFRIPYFVGPLGKEKNPQREKAFGWAKRRPGFESTEIKPWNIEEVVDFDQAAEDFITNLTGECTYYYGKSVIPKASLLYSEFCVRQELNKCKVAADGEKETLMDIETIEGIYQNVFKRYSKVKVDTVREYLKSTGFINTGFKGTQKEGEFASSMKSYCDFRRILGRDFDSYEDYEMVEQLILWVTVFENKKILKRKINQTYGPEGLQVLTADQVNKISKLRYTGWSNLSREFLTELKVDYNGRKLSIMGALRGGTGRPLNLMEVLKKDYLGFDELLEEVNAEYLKAHKGFMLDEIPGSPAIKRGINQALGIVDEIIKLAGKPPRRIVVEMAREEVGQGKGKRTNSRLKQLEELYKNLQNDILLQDSKELKGELKEYGDRLDDDRLFLYFLQRGKCMYCGESLKVENLSSYDIDHIVPQSMIKDDSLNNRVLVHSECNRHKADIYPLPADLRSKNASRWKLLKEGGLVTTKKYNNLMQINDTRQLNAMAKGFINRQLVETRQITKHVVTLLQSLHEDTTVETVKAELTHRLREAYDLPKVREVNDWHHAHDAYLACQVSRFIHERFTGMAEDLDYDSFSRYAYVVKGAQQSNSGLVVGSFGRARLGEYEDAWNGPAEVERIQQALNFKDCFVSKKLERLKGEFWNQTVYSPRTHSDKALPLKQGKDPDTYGYYMSPNSAYYALVEYSDTSKKKPKTKREMVGVPIDISYRIDNGHDLLTLQAYVEAIFGGEVQILRAPIYKYQKIEWNGGFYYLVSNSEMINARQLWLPHVYVDYLALAQAALSPAARYADKRDFEEWPEKDELSEEIFNYLSEQINNYYPRYGGLYDKLTSEKAVSAFESKSPEDKCKALIEILNMLHCNARTGLASLGLSGGAGRMNMLNLSDPTIVFIDTSITGMYESSASYEA

SEQ ID NO: 102 - protein, 1417 aa, unidentified
  REGION 1..1417: note = Synthetic sequence or unknown origin
MKHKYIIGIDPGVGSLGISLRNTERNALLEQIEVTNVDIVRSGVVKNGEGKYVSFAAERRGFRNTRTLYRHRKRRKQETLKLLINEDVVLDENIKHVLCPLSKEELDKWVRYDNNKGYKREYPTDSVEFSHWMMLDFNNDGKVDDYSSPFQIRKELVERQFDFSQKEDCYKLGRALYHIAQRRGFKSSKGSINDSDVISLGDNQDDDFDSLEYSEKKKSKTLTAYMNQLQEKGHERVTVGFALACLENDGVRLRDSEYQAIRTQLKEEITTIFKFQKQLSLNSTLYKRLVSEKKNDGTIFYQCPIKSQKGNVESCTLEPRKKRCQVSHPEFEKYRAWSFINNIRIKLLADSEPQMLPYELRMKLFDKITGTVSKTIDFIGIRKLIEKEVGEPLSANEGTINFKDDYSLSGCPTIGRLRKILGDDWETKTIEIEQTRRRNKNQEVKDLHTISYGAIDLWHICTTMENETAMTAFLEKKMPFDEEQNKEMMRLYKNVSNDYANYSVYALQKINRFLISGCNNYEATLLAKIPDIIGKTQWKQYGKDIETDIQNLIAQNREEKRYLAIANQLIADYKSQDEDDRDHNYEYQLTELDWRDVENKIKESIGKVTWTNIPTEEQNAIKLRVGELYQQFFKSYKRDYYKLPNDTERIQSYLSERISLNLQKVQQIYTPSSNKYYPPAHRVKGVFQLGSPAKIALRNPSAMRILYLLRRRINELMTRYRDMEPDNTRIVVELPRELNDANMRRAIELYQERRKKENNIFKNMVGEVLDEKEEERVEKTRLLIEQAPEYLNADFDERYQKHKEVNSYNRNSYNDTIEYATTKYRLWLEQGCIDIYTGHTIPFSHLFDANMYDIEHTIPRSIVLEDSLENKTITSAFFNQKVKGTLLPSQLPNYNDVIVPNLQPWKERVERLDERVRYWLRETKRAADSDRKNYCIVQRHLWQMELNYWSSKLNRFLMTEVKTDFVNKQMSDTRVISKYVYHYLKSCFSSVDVQYGCTNAVFRKILGIQAKDEEKDRSVHTHHAIDATVLTFIPSSSKRCEMMRLFFQIDEAKKAGNIMEEKRLKKQLEEEKNLCLYGRTNKKHSDKNLANLVRDIQETTFVNHSERDQALTPAKRRGVFRKNGTTYNVLKTGDCIRGKLHKEKFFGAITQWEKDADGLVVRDAMGQHVVDTSNVKYVIRVKLQYKQGRGEGFKSWEELKARMIDKSLYRKLEEQHPNETFVEACKNGFFTMRKIHGEFVRNRIRHVRCEISDNQGHISIKQHLNRSKKDYKRFYYAAPADLLCACEYRGVKEQKYEMMRLFDISQNRKDGKEDIPTSLQGKKEILHLVRVIRMGDMVILYKDSPNELDGLDKKQLSKRLYRVDGFEKSGRIILVKHDKTKEDGKGKSCSDFEDRISQNIIRMSITKVKFVPLINHR

SEQ ID NO: 103 - protein, 1420 aa, unidentified
  REGION 1..1420: note = Synthetic sequence or unknown origin
MSNYNNFKKYGDYYIGLDVGTGSCGWAVTDTSYNILKVSGKSLWGVRLFPTADTAAERRSHRCARRRVFRNRQRLNLLEQLFDSEISKVDVGFFQRLKNSEFKEISKNNLFGDCTYNDKDFFKEYPTIYHLRYKLMNEPIDDIRLLFLAVHHIIKHRGHFLFDNVNNIGASLPELWEQCCSQFVDISLFSNLSEDYLDIAESLKQNLIDMRDDVINVIKTSSDKKADLNKVFAQLKSVYDEISDYEVKKTIENRVNKWSLLLLGYKVSAVEIFSIDESDEEGISCKIQINSSDYDEQLLKIKDEFKGVVESEKAVYDVIKLQEILKGCKSISEAKVKLYNKHAEELRIFKNLLRERLSEKILIEVNKNVKVANNEKLTSDPKSFYKEIFEERNKNTEKGKICFYYDITHGDKSANKEAIKGSSIYKRLQILAQILLCSSKIYKLSEKEKVLLHRIGDLSIFETQVSADNSVIPYQINLAELDKILKVQSKNFAFLSEKDDAGVLVYDKIKALLTFRIPYYVGPLNNHSKFSWIVKKSQEKIVPWNFESVVDTEKSAEAFIKRMTSKCTYLSGEDVLPKNSIIYSKFMVLNVLNNIRINGMRLDEAQTGLTKKVFDELYCNQINVTQKQLVAYLYNNGFLTSKEELTGFDDEQKVSMSSYVKIKNALGTDNFDINFAESFIKYSTLFPNDYLMIEKRLKREFSSECAKFNEKLSKLCRIKFSGWGRLSEKLLIGLIGYNKNSEFDKNSILGFMLNGKGNLMELLSSEYTFSDLISSENSTLDENNAFSYQNLVEGLYVSPSVKRMIWQTLLVVREITKKIMGYEPSRIFVEMARGATADQKGKRTNSRKKSILALYDKCRQDFDISDLSSKLENEKDSKLLSDKIYLYYTQLGKSVYTGKEIKIDEFDLYDIDHIIPQSLTKDDSLDNRVLVEKEINQNDKKNRYPLSSEIQENQKQFWKHLLDLGLISKSKFERLIRSKPLSNSEKEGFIARQLVETRQSTKAIAGLLSKLYKTAKIIYPKAGLTADFKQRFDLIKVRELNDLHHAKDAYCNIVVGNVYYEKFTSNYLYVIENNEPYSFSTSDKSYIFTKQNEKRLRETGTWDSRNGKSISIVKKYYKRNNILMTYKQEERIGALFNQTLYGPEKGTIPKKKNMSCQDYGGYDSDQNSFFSFISYKDDKANLKTKLIGIPLRVVYGLSDKASAISHYLLTEKANEYREPKVLIDFLPFNFILKDNETGFLARVVSFASKGKQLEIKQFNPLVLDEKNLKPLKAIEKFVSRLKNKSIKIKYEKDKSGFTDEDLSSIYSELKDKSKNSVFKNLPKPIVKMLSDVDINNYKYQESEKSEPKLLTIEQKAVAICELIKAFHTESSNLLFLGEKKGSGVKRIKTVLDLEKTDYSILCSSITGFYEKEIRLRDLLK

SEQ ID NO: 104 - protein, 1469 aa, unidentified
  REGION 1..1469: note = Synthetic sequence or unknown origin
MKNILGLDLGTNSIGWALIQTDDEGKTYQRDIKLGSRIIPMTQDVLGAFEGGAPIQTQTASRTQKRGMRRLYERRALRRERLLRVLHILGFLPDHYDHSIGWDPRQTKTFGKFINPDEEPKLAWMRDAQGKPSFLFKSSFEEMLADFKAKQPEMVANDKKIPYDWTLYYLRQKALLQPITKEELAWILLNFNQKRGYYQLRGKDEISQDEDKSKIVEYIEQVVTDVDFDPNEKESSKGRWYNVHLANGMIYRRQSQISLKDWIGKKREFIVTTELDDHGKPKLNKDGGIKRSFRAPEANDWTLRKVRTENNVEQSGMTIGAYIYQHLLTDPSGKIIGKFVETIDRHFYKDELTAILKKQSEFYPELKDQAMLDACSKALYGHNSARQFSLKQKDMAYLLIEDVLFYQRPLKSKKSLISNCPFESHTYVDKETGEVKKEYIKCIAKSNPYFQEYRIRHFMQNLKIYDTSGLEEKDVTEQYLPDAEAWKRLYNWLNERDSVNQDSFLKDFLAIKKPKGKDAKYLLRWNYVEDKDKKYPVGETHALLKSCLEKAGAATSLLNDFAVEYRLWHLLYSIDDVNELKGALRKFASCYRISDIDSFVEVFSKAKPFDKDYGSYSEKAIKKLLTLMRQGIRSEQACEQLYEKKPAEQWTSPSDIHAFITDFQQHSLRNPIVEQCILETLRTVADIWQQCGHIDEIHLELGREMKNPADKRQQISNRNRENENTNLRIRALLTELLNDSNIQDVRPNSPMQQDILRIYEEGALTELKPSDPEYKEIQEISRLAQPSVSQLTRYKLWLEQRYRSPYTGRVIPLARLFTPAYQIEHVIPRARYYDDSLNNKVICEAEVNKDKTNLLAHEYICQNGGKLITTTSGTVKVFNKEEYEQFVQDHYAILKTKKRNLLLDDIPEEFIQRQMNDSRYISRYVKALLSNIVRADENDDLETSKNVIVCTGSVTDRLKKDWGLVDVWNQLIYPRFERLNNLTGTNLFGQWVNKDGKRYFQTDMPLALRKGFSKKRIDHRHHAMDALVIACATRSIVNLLSNMNANKTEQREDLKRTLTGKGGLFNKPWPTFTQDAFQALSEVVISFKNKVRVLSRASNYYEHYDAEGRKRQVAQKGGKQFVVRKPLHKDHMYAHINLRRKKSVSIDAALQEVRNIVDTKLRNRIVDLFSQGLDKKKIKKQLAEEGVGKQIEIYFFTDDVEPLVAIRNKLDKSFDKKKILSITDTGIQKILLAYLASKGDNPGEAFSPEGIAELNEHIAEFNGGRRHQPILNVRVTEKMGEKFQVGETGSKSRKYAEAQSGTNLFFAIYESEGGKRTYATIPLNIAVERIKQGLGPVPEKDEIGCTLKFFLSPNDLVYVPTEDEMLHKNIEIESLDKERIYKFIDSSVTTANFVPHRSASLLYALPKDEAVSFCKTDKIVQNEYGIGSPQSKNQKSISNGKNTADIYIIKSVCWKLEVNRLGQITKIIR

SEQ ID NO: 105 - protein, 1483 aa, unidentified
  REGION 1..1483: note = Synthetic sequence or unknown origin
MKNILGLDLGTNSIGWAFVSTNDEGNTIQNLKLGSRIIPMSQDVLSNFDSGVTKSQTAERTGYRGTRRLRERCLLRRERLLRVLHILGFLPKHFDNSIGWNKDDNKSYGKFIDDSEPKIAWSKNAEGKMQIVFTEAFNEMLDDFKSHNPNLINGGHKVPYDWTIYYLRDKALRKPISKQELAWILLNFNQKRGYYQLRGEEEYEEENEQSKLKKIEYHELKVDRVETTEERRGDDIWYNIYLENGWIYRRPSRIPLDDWTGKKKEFIVTTEYNEDGSIKLDKEGNERRSFRAPKEDDWGLQKKKTESQLDSSNQTVGSYIYHHLLYNPKDKIRGKYVRTIERAYYKQELKEILKKQSEFITELTNSTLLEQCICELYSTNKAHQESLRKKDISYLLVDDLLFYQRPLKSKKSLISDCPFEQYEYADKTTGEIKVQHIKCVAKSNPYYQEFRLWQFIQNLRLYSNSVEEQEVTNDYLKTEEDYVHLFKYLNDKKVISQERLLKDFFGLNKPRGKDTVFPIRWNYIADKTYPCNETRSKMLSALDKANISTDILNDKYTEYRLWHLLYSVEDINEITGALTTFAEQYDLPVGFVDAFKKISFKKEYGAYSEKAVKKLLSVMRMGSMWSADAIPDNIQKIINGSIDEKVKERMSHQNIILDDISKFKGLPVWLACYAIYGRHSESKDITKWDTPQDLANFIKNFKQHSMRNPIVEQCILETLRTVYDIWVKYGHIDEIHVELGRSMKSTADQRKRMTDTNTKNENTNLRIKALLMELKNDPTISDVRPQSPMQQDILKLYEEGALLNLDKNDIDFKEISSISQKSSPTQSELTKYKLWLEQKYHSPYTGKAISLSKLFSPAYQIEHVIPQGRYFDDSFTNKVICEAEVNQRKSNMLGMEFIKKCGGEIIHCPTIGDVKVLTTDEYKAFIADHYASNPIKAKKLMMDDIPEEFIQRQMNDSRYISKVIKGLLSNVVREEDEVDAISKNVIPCTGGITDRLKDDWGLKHVWNSIVYPRFERMNRLTNSEDFGHWENKDGKRVFQTKVPFELSKGFSKKRIDHRHHAMDALVIALATRNIVSYLNNESARDTKRRENLRQLLCDKNRIIRKPWPTFTQDVYEALQNIVVSFKNYVRVINKASNYYEHYDENGVKTTISQNSSEQWAIRKPMHKETVFGLVNLQRKKEVPFNKAIERISSIVDKELRSTIRAMITAGMDVNKIKKYFKDQNYQFAGKPVSKVLVYYYTDENERMVATRKPLDDSFDEKKIHSITDTGIQKILLNYLASKGNDPKLAFSPEGIMEMNEHITDYNSGKNHQPIVRVRLAEPKGEKYNIGTTKNKNKKFVEAQSGTNLFFAIYEKEDGTRSFQTIPLNQVVERMKMGWTPAPEQNENGDKLKFYLSPNDLVYVPSEEERMSDSELINRERIYKMVSATGGRAFFIPVTVASVIANGIEFQSTNKIENINNVSIKSICWKLEVDRLGNITKIVR

SEQ ID NO: 106 - protein, 1484 aa, unidentified
  REGION 1..1484: note = Synthetic sequence or unknown origin
MTNIRNAEHYNIGLDMGTGSVGWAVTDQDGNLYRFKGKPTWGSRLFTSAEPAATARTYRGQRRRYDRRRQRLNLLQQIFQPEMEKTDPDFFVRLNQSRLWKDDPQRFGEYTWPLFNKKHPLIIDGKEITEPVYYGMFPTIYHLRFWLMQQTNQVDIRLIYLAFHNIVKTRGNFLYQDMGTALTAKNADISKSIDEFAVAFEDWQGSLDEESPLKGAVVDTDVLEAALNDTQTRRAEKEEVAAKAFSTDSSDKKKMGKAFADAFIGYKANLTYIFDIKEDNKDIKLSFGDEEKVDAAKELLGDEDKLLFEAMNAIYSSVVLQGILHITNAEVYWASGIFKTALAGMDIDDCAVTISKSKIIEYGRYREDLKCLKQLVKKYYPNDEETGKNSSEYKTFFKGKEFCDPKSKVPVKGHKHRHMKYDPATAEGYTRYDLGAKGGTDIRTKSGVTPYEQFKKDTLSIFRVKYANGKLRPLDESAIALKAAADESILEIAKRFEDQTFMRKLKTSDNGVIPYQLHLEEMTAIIEVQKASYPFLAEVYTTHDGAVRNKIKSLVSFRIPYYVGPLTQKSAAKDAEGRNRFAWSVRQAGKESAKVYPWNWDDVIDKEASADAFMHRMIGSDTYLWNEPVLPRCSLLYEKYCVLNELNGAHYKDTDGNIRRLDVSERKQIFEDLFIHGKHASVSYRDVEDWAKRHCRRYAELSGGQEENGFESKLGSYRYFCRLLGTTDLNDSQREMAEDIIEWNTLFEDRDILRARIKEAYSNFLSDKQIKDVCKKRFTGWGNLSKKLLTGIKVKSDEGPVSVMDVLEYGYPNAGCSAFRHGDAMVLMQVLHNETLDFEEKINEINEESGEGRLLTVDDLPYASPALRRSINQTMRIVEEIVSIAGCAPENIYIESTRDEDELTKKGRTKKRFESLNAQLKCLNGEQLKAGIMNELKENESKLDSDRLMLYFMQNGKSMYSGADLDIRNLSSYQIDHIIPQSYIKDDSLDNRVLVKADENQRKKDSLLLDESIRKRMKPVWDALHNAHLMSDKKYSNLCCDSISERRMQGFISRQLVETSQVVKFAAQMLAQRYPQNSDGTGTRVCTVKAGISHQLRQVWDNEAGRYVWRFPKVREMNDYHHAHDAYLATEVGRFISIRYPESYTNPVGMAKAMRTYIKRRANQYAIDHKAPGHSFIAASFLENGFDKETGVVTRDKWDAEAELARMTKYFNIPDCYITRMPEITAGAFSDATLYSPRNKEKYANLAMRLKGNLETQKYGGFSREQFAYFFIYEKQDKKGRRLFCFESLSVSRADEVQRYGVAALERFAKNLLAPGETFIRIVRPALYKNQLVEIDGSRVLLRGAAEVRNATEMAFGLSEARLLADIADGKTLSKKDLLRLYDRYTDKIQRYAHELDEKLNLREHRSAFEALDSVQQPQVLLQVLALLNAKTNAIDLTGIGESAHAGRLQYTFNKLLNSGRFVVIDQSITGMFENRVTLRHEEG

SEQ ID NO: 107 - protein, 1491 aa, unidentified
  REGION 1..1491: note = Synthetic sequence or unknown origin
MGQILGLDLGTNSIGWAVVDNAAQKIIALGSRIIPMSADVLADYEKGTLETQMAKRRGFRGTRRLYERSKLRRERLHRVLRILGFLPVQYQQQIDFEKHPGKFKDNGVPLIAYRKDAYGKLQFAFISSFNEMIEDFAKHQPSLVADGKLIPHDWCLYYLRQKALTKPVSKEELAWIILNFNTKRGYYQRMEEESDNSKMEVYKRLKVVDVVDNGVNKRRKDQHDYVIEFEEGVKKTITSRYIPYGVGDELNLIVSYKLDKEGNRRTDVEPSTRIVNNEKDWTLLKTKTEADLEASSLTVGAYIYQHILNIPSDKIRGSFVRTIERKFYKDELVRILNKQAEFHEELRDSALYKKCVNELYHQNEAHRASLEGKSFTDLIVDDIMFYQRPLKSKKYLISDCPLESYTYIDKETGEIKPKSVKCITKSNPIFQEFRLWQFVRNLKIYAKQREVNGKLRLDYDCTSEFIKSEDDVASLFEWLNEKKEIDQTQFLKYPGFGIKKTELDNYRWNYVEDKKYPCNETRYLIMSRLKKVDKALTLTTDEFYKLWHILYSVDDRIQLDKALCSFARSIAADEDEFCSQFRSTPPFKAEYGSYSQKAIAKLLPLMRCGKFWDEAAIDASVKERIDSIVAVGIENQKIMERVNERSISLSRISDFRYMELWLALYVVYGDKADVREDRRWTTPDDIDCYLRFNLKQGTMRNPIVEQVVTETLRVVRDIWKAYGSIDEVHIELGREMKQTKDQRLKTLARITDNENTNIRIRALLQEFTDPSYGVKDVRPYSPMHQEKLKIYEEAVLDAVEADDEIKDILKGFRETDASKRPSHKQVERYKLWLEQHYCSPYTGQPIPMSRLFTEDYQIEHIIPKARYYDDSLSNKVICESEVNQLKSNMLGYEFIREKGGQIIGNGLKILNTTQYESFIKDNYSRNRAKMNNLLLEEVPESFINRQMNDSRYISREIMHILSNLVRNEKDDDEPVSKNVIPLNGKVTTVLKKDWGLNDVWNQIVYPRFERLNRITESYDYGEWRMVGGKKVFQTSVPLAISKGFQKKRIDHRHHAMDALTIALTTRNHINFLNNVYSGSEGIKNREALKRVLCDKQNGEWLFKKPWESFTQEAFTALSGIIVSFKQNLRVINKMNNHYQKYVDGRKQYVKQTAGDSWAIRKSLHKASVSAAVNLKLVKSTRLADALKNDWELICDKEIKKAIKELIKQYGGRFDAKVITKYFKDRDFKLNGKDISKVEVFYYSDEKEPLSARRELLDTSYDEKKIMSITDTGIQRILLNHLHKYDDEKGKAHPENAFSPEGIMEMNKNIQELNGGKPHKPIYSVRKTESKGMKFSVGSSINNLRKYVEADKGTNLYFAIYIDNDGLRSYESIPFNIVVERLKRRLPAAEEVKEDGRKLLFTLSPNDLVYVKEDDSKINENDNLDNGSVYKMISSSDRDCFFIPAFVASPIVKTIELGSNNKSERSWNGLQIKKVCCKLYVDRLGRVYKIIQ

SEQ ID NO: 108 - protein, 1537 aa, unidentified
  REGION 1..1537: note = Synthetic sequence or unknown origin
MKKILGLDLGTNSIGWALVEKSDKEGRIIKSGSRIIPMDAGELSDFANGKTKSKTADRTSKRSARRLRERFLLRRERLHRLLRIIGLLPKHYEERIGWDIENDEKHFGIFLEGEEPKINYLKDENGKNRFLFEDSFLEMVKEFKGKHPELKSIPKDWTLYHLRNKALHSKISKEELAWIILNFNQKRGYNQLRDEVLDSQDGKKSEYKELIVKKVTPDEDSKGEKKWYTIEFKGSDIIYRRQSKYDLDWVGKKRGLIITTKIDENGETKLKKDGSLDYSIKSPEDDDWGLLKIKTEQDLRLSGLTIGQYIYHALLDNPSQKIRGGLVRVIERSFYKDELRKILEKQCEFHPEFNDRDLYEKCITELYKNNTAHRNNIKNKDFTYLILEDVLFYQRPLKSKKSLIDNCPYESHNGFDKETGEIKQFPIKCIAKSNPFYQEYRIWKFLSDLRIIANTYEKDGHLYSDVDVTQEFIKDSYAMSDLFLWLNDLAKVDQKTMLKKLGIKKAEENKYRWNFVEDKIYPMNATRHAILSKLDKGEKLTKENEYLLWNLLYSTQSKAEIDKSLSENTPSGKPNTNKLYNKLRKDGISSESLEKIKTIKLPDEGYGAYSEKAIKKLLPLMRTGQCWDADNIDMYTASRIQAFIEENNLDNFSERIWSRISSLKTVDSYQGLPEWLACYIVYGRHSEANEVVKWKTPQDIDMYLNNFRQYSLRNPVVESIVLETLRVVRDLMAKYGNFDEIHIELGRDLKNPSDKRASITKQILENENTNLRIKALISEFTDSEFKIENVRPYSPSQQELLRIYEEDILNQYEPDSEILGIIKELSNPTVQPSRNKVLKYKCWLDQKYVSPYTGKPIPLSRLFTSDYEIEHIIPQSRYFDDSFSNKVICESEVNKLKDNLLAYEFIKQHHGYTLQSGVRIFEVKEYEEHIKNVYSSRKASSKRKKLLMDDIPTDFIERQLNDSRYISKVVKSLLSNLVREEDENGNLEPEAISKNLIVCNGTVTTRLKRDWGLGEVWNSIVLPRFQRLNDLTGRTCFTTTNKEGKEIPAMPLELQKGFNIKRIDHRHHAMDAIVIACTTREHVNLLNNEASLPKNKEMKYALSHRLRRYAEEIVNGQKRNIPKEFLMPWPSFKTDCKNSLNEIVVSFKQNIRVLNKATNSYFAYNDDGHKILNHQHGSDHFAIRKSLHKETIFGHVNLRWKKEGKLKEAISKPSMIVDRRLKKKIQEMLNKNYSEKQILAYFKNFSYEWKEFDFNKIELYYFSDEKEALVATRFGNDLVSLFSGKTKKEEIEKVIEKITDSGIRKILSTYLSQNLEKIEEAFSPDGLEKMNENISSYNNGKEHKPIYKVRLFQPKGNKFLVGDVGCNSKKFVVADAGTNLYFAVYASSNGKRTYKTIPLEEVIERLKNKISPVPDIDENGNNLLFHLSPNDIVYLPTTDQIISNHDLIQDFDRNRFYRFIDSSGTTANFIPANSANVIYHLEKNEAKKFCIGAVIQDEYGKGSPQSKNQKAPTKDEEMIKELCIPLSINRLGDIKQK

SEQ ID NO: 109 - DNA, 2961 bp, unidentified
  misc_feature 1..2961: note = Synthetic sequence or unknown origin
  source 1..2961: mol_type = other DNA
atggaaaaaagaattttcggttttgatatcggtattgcgtcgctggggtgggcggtcgttgatttcgacgacgcggcggatcctgaaaacaacatttatccgacggggaaaatcgtcaagtcgggcgtgcgttgcttccccgtggcggaaaacccgaaagacggcagttcgttggctcagcccagacgtcaaaaacggttgttgcgccgattgtgccgccgcaaagccagacgaatggcgggtatcaaaaatctgtttgtcaccaacgggttagtcggcaaggacgctttgttcaacgaaaaaagcaacatttacaaagcgcgcgaaaacacggacgtttggaatttgcgcgtcaaagctttgaccgaaaagctgacgacgatcgaattcatccgcgttttaacgcatttggccaagcaccgcggttttaaatcctatcgcatcgcggcggaaaaagcggacgccgaaagcggaaaagtgctggaagccgtcaaagcgaacagggctttgctggaaaacggcaaaactttggcgcaaatcattgtggaaaagggcggtcaaaagcgaaactggaaagataaaaaaggcgatgcgacttatgccaattcgattccgcgcgatgaaatcgaacgggaaacgcggctgattttcgaacgtcagcgggcgttcggtttggcggcggcgaatgaaaaactgcaacgggatttcgaacggatcgcttttcgtttccgaccgattgcgggagtcgacaagatgatcggcaagtgtcagtttgaaccggacgagccgcgcgcgccgaaaaacgctccgtccgccgaatttttcgtggcgtggacgaaaatcaacaactgtcgtgttaaagacgaagacggcagatcgcgttttttgacgcaagaggaaaaggaaacggttttcaatctgttgaaagatcagaaggaaatcaaatattccgctttgcgcaaggctttgttcgccaagcgtcccgatattaaattcgccgatgtcgaatacaatccgaagcccgtgtacgataaaaaaacgggtgaaatcaaagaaccgcccgcaccggaaaatttgaagtttttttctttgaaagggtggaacgaattaaagcgcgtcattgatgtttcggcgtatcccgttgaaacgctggataaaatcgcaaccgttatcgctacgcaaaaaaacgatgctgacatttccggcgaactgaaacagctcggtttgcccgattccgatatcgaaagactgcaagggctgcagttcaaggagtttattcgtctgtctttaaaggctttgtacaagattctgcctgaaatgatgagcggtaaaaaatacaacgaggcgtgcgacgccgtcggatacgatttcaaatcgacgggggaaagctttgccgcgcaaaagggaaaattcctgccgccgattccggaatctttggcgacgacggttccgacggtcaaccgcgcgatatcccagttccgcaaagtgtacaacgccttggcgcgtgaatacggaacgcccgatcagatcaacgtcgaattggcgcgcgacgtttataacgatcatgacgaacgcaaaaaaatcgaagcgcggcaaaaagagtatgctgaggaaaaggaaaaagccaaggctttggcgcaatccaaaacgggaattgaagacatcggcggacgcgatttgttgaaattccgcctgtacgaacagcaggacggcaaatgcgtttattcgggcgaagctttggatttgcggcggttgacggaacaggattattgcgatgtcgatcacatcattccgtattcgcgttcgctggataattcgcaaagcaacaaagttctgtgcttgtcgcgtgaaaacaggcaaaaatcgaataaaacgcctttggaatatattaacgatcccgtgaaacaggcggaatttatcgcccgcgtcaagtctatgaaaggattgaacaaagcgaaaaaggacaggttgttgacgcgcggttttgacgaacgcgaagttgaatttcgcgaccgcaacattaacgatacgcggtatatggcgcgctatgtcatgaaatatcttgacgactgcattgatttttcgcaaagcaaagcggcgattaaagaccgcgttcaatcccgcaacggggcgttgacggattttctgcgccaccaatggggattgcgcaaagaccgcgccgaaaacgaccggcaccacgcgcaggacgcgatcgtcatcgcctgcgcgaccaacggttacacgcaatatctggcttgtctgtcgaaaatttttgaaaacaagcaggcttacgccaataaatacggcgaaccgtggtacaaagcgttcaaacagcgcgtcaaacagccgtgggacggtttttatcaggacgttcaagcgtcgctggcggaagttttcgtgtcccgtccgccgcgcaaaaacgcgacgggagaggtgcatcaggaaacgatccggacactgaatcccgataaaccgcaatacagcgaaaaggacgtcaaatcaggggtgaaaattcgcggcggactggcgaacaacggcaatatgttgcgcgtcgacgtgttttccaggaaaaacgccaaaggaaaggaacagttctatctggttccgatttatctggcggacggaatcaatcccgaattgccgaacaaggcgattgttgcgaacaaacctgaaagcgaatggatcatcatggacgaaacatacgcgtttaaattcagtctgtacaaagacgatttggtgaaagcgaaaggaaaagaattatactttgggtattttgacgggtgtgataggtcaacgggctgttttcatattgaagcgcaagattcttctcaatattggaaaggtcttggtgcgcgcaaccttgaatacatcaaaaaatatcaggttgatccgctgggacgatatgtcgaggttaaatccgaaacccgcctgccgctgaatatcaaaaaaggaaacccctga

SEQ ID NO: 110 - DNA, 2991 bp, unidentified
  misc_feature 1..2991: note = Synthetic sequence or unknown origin
  source 1..2991: mol_type = other DNA
atggcggagtacacgctgggcctggacattggagcgaagagtgtgggatgggcggttgtggagaatggcacgcgggcgaggattgtcgcgatgggcgtgcgggtgtttcctgagggggtcgaccgggaaaagagcgggctggagaagtccaagggggcgtctcgtcgcgaagcgcgaggggcccggagaacgcgacggcgaaggacactccggagaacggcactgattgcagcactgaggggagcgggactggcgccggcggacgatggggaattggcgggtttactgtccgaagtggacccatatccgttgcgggcgaagggactagatgagccactgacaccgcatgagttcgggcgtgtgttgtatcacatcaaccagcgacgcggattcaagagcaacagtaagagcgccaagcagaaggaggacggagagatcgccaagcaggctggcttgttgcaggcggcgattgaagcagcgggatgtcggacggtcggagagtacttcgcacggaccaatccggaagagaaccggatccggggacactacacctttagaagcatgtatgaaagggagttcgatctattgtgggcgaagcaggccgtctatcatcccgacgtactgacggaccacttatgccagcagataagggacagggtgatcttcttccagcgacctcttaagccaacagacgctctcatcggggagtgcggcctggagcccggggagaagcgctgcgcgaaggccgcatggtgcgcgaggcggtttcgaatgctgcaggatgtgaacaatctgcggattcacaatcccgatggacgtgaggtctgtctgagcgacggcgagcgggaaatcgtgctgcgtgaaatgcagcagaaggctaaggtgacattcagttcgatccgcaagaagttgaacctgctggagacgcaggagttcaacgcggagtatgaggtcgatgaaaagggcggccggcgggaggcgttggcgggggatgcattctccgcgacgatgcggagcaagaaggtgtttggcaacaaggcgtgggatgcgatggatgaggcgcgaaaggtccgcctcaacgaggcattcgtcgagttggaggatgatgaattggtggaggtgttggcaggggaatacgggctcagcgcggagcagatggaggcggcgatgaaagtccctctggagcgaggatacatgagtttctcgcgcaaggccattgagaagttgctgccgttgatggaagcggggaagaggacggacgaagcgctggacgccgtatatcccggtcgcaaccagagggcggaaggcgtcggcgtggaaagactgccgatgccggaggatttgcgcaacccgattgtgaaccgtgctctcgttgaagtccgcaaggtggtcaacgcaatcgcgcgggagtacggcaagcccaagcggattcgcgtggagatggcgcgggacgtgaagggttcggcaaaggaacggcgggagaaacactacaagatgctggacaatgagcggcgtaacgccgaagtacgggagaagttgcggcaggacattgggatcgctcggccgacgcgggacgatgtaatcaagtataagctgtgggaggagtgcgggcacacgtgtccctatacaggcaagcacatctcacagacggcgctgttcggacccaacccggatttccaggttgaacacatccttccctattcgcgcagcctggatgacagttacatgaacaagacgctgtgcgaggtgcgggagaaccgggtcaaggccaatcggacgccgtgggaggcatacgggggcgatgaacaacggttcgagcagatactgcaacgggtcaagacgctaccgtggccgaaacgccagaagttccaggccaatgagttggaagggctggatgcctgtatccagcgggaattgaacgacacacggtatatcagccgggaggtggtgcgttatctgaagatgctgggtgtcatcgtaacgggaacacggggctcggtgacggcggaactgcgccatcagtgggggctcaatacgattctggacccgacgggaagcggagagaagaaccgcgcggaccatcgtcaccacgcgatcgacgccgtggtgacggccgtgacgagtaacgagcacctgcggcggcttgctgaaagcaagtatggcaacaggggggatggattcgcgccgccctgggaggagttccgggaggaagtggaggagaacgtcaggcaaatcaacgtctcgcatcgggtgcgccggaaggtgtcgggggaactccatgagaagacgttctatgggccaacatcggagacgggcatctacgtataccgcaaggacttaacggcgctgacacctgcaatggtggcaaagatcgtcgatccggtggtgcgcgaaattgtcgaggagcggctgcgggcgtgtaagatcgacgggcagcgcgacaagaagatcccgaaggaggtctggaacgaaccgctgtatatgcggacgacaaagagcgacaagaaggtcctgatcaagaaggttcggatacgggatgtctttggaaagaccatctcgtttcgggacggctccggaagtgtgtacaagaccgccaaacccggaagtaatcaccatgtggagatattcgaatacacaaacgagacggacaagagcgggcggccgcggcgcgatgcggttgtggtatcgctgttcgatgcggtgcagcgaagcaaacgtggagagccggtggtatgccgggatcatgggccgggaacacggtttgtgtgctcactggcaataaacgagatggtgctgatggacaacggctcaggggagatggacctctatcgcgtgcagaagatggatgtgagcaagacagtgtacttccgccagcacacggcagcgacccttgaagatgaaggcacgctgatccgcaaggcggctcatgtgttcgaggggtataaggttgtggtggatcctttggggagggtctatagggcgaacgactaa

SEQ ID NO: 111 - DNA, 2997 bp, unidentified
  misc_feature 1..2997: note = Synthetic sequence or unknown origin
  source 1..2997: mol_type = other DNA
atgaaaagacgcgtttttggctttgatttgggcatagcatccataggctgggcagtcgtagagtttgataatgaatattatgatatggaaacgggagaaattttagctgacaaggtcaatggaagcggagaaattgcgcagggaacaatagttggctgtggagtgcggacttttcctgtggctgaaaaccctaaagacgggagttcattggcagctgcacgacgggaaaaacgtttagcgcgcagggcttgtcggcgtaaggctcgtcgcaaaaaaggcttgcagggcttgtttgctgcaaaaggtttggctgaaagccctgctgcatttactgatgaaatttgtatgcggcaaatcggcggtgatgtttggaatttacgggtgaaagcgttacaggaaaagctttccaaagaagaattagcgcgagttttatatcatttagcaaatcatcgcggatttaagtccgtccgtaaagcgcaggaagaaaacgataaagacagcggcaaggttttgtctgctattcgtgcgaatatggcattaaaggaagacggcaaaagtctggcgcaaattattgtggaaaaagccggtgaaacaggtaaaaaacgtaatttttcaaaggttgttaaagttaataaaaaaggtgaagatgtaaaagaagctgattatagaaattccattccgcgcagtgaaattgaagcagaacttgccatgatttttaccaagcaaaaggaatatggtatttttacacaagatttatatgatgattttgtaaaaattgcttttcgccagcgcggcataaaaagcgttggggatatggtgggaaattgtacttttgaaaaagacgaaaaaagatctcccaaagaagcgccgacagctgaattttttgtcgcatggagtaaaatcaataatcttgctgtgtatgagggagataaaaagcgtgagttaaccccagaagaacggcagactttatttgatgtattgaaagtaacaaaagacataaaatataagacaatcaggtcaaaggtatttaaaggaaaagatattcaatttacttgcttaaattattcgccaaaacagaaaaaaaataaaaacggtgaactggtaacgattgatccagaagatgtgcttttttataatatgaaaggctggcataagctgcaatcaatatttaaagctgagtacagcgatatttttaatgatattaaaaaattagataaggctgtcacgataattgctacagaaaaagaagatgtaaaaattcaagaaaagttgcaggaacttggctattcacaagaaaaaattgataaatttttgactttgtctttcgataaatttatcaatttatccttgaaagctttgtataaaatcaatccgtatcttgaaaagggcgaaaaatatgacaaggcttgtgcaaatgcaggctatgattttaaagaaataacagataaactcgttaacgaaaaaggcttgctgcttgctgttattgataaggaaaaactaacgaaagttcctgtagtcaatagaaccattgcccaattcagaaagttatataatgcaatggtgcgtcaatatggtgcgcctgatcaaataaatattgaaacaggcagagatctgaaaaagagtgcagaggaacgcaaaaaaattcaaaagcttcaagaagaaaacagggataaaaatcaaagcataaaaaaacaattattggaatggggtgttaaagataatggaacgaatattacaaagcttcgtttatataatgaacagcaaggaaagagtatctatagtggaaatgaaataaaaattgaacagttgtttgatgatgggtatgttgaaattgaccatattctgccgtattcacgcagctggaataattcccaaagcaataaagtgcttgttttagcccgtgaaaatcaagaaaaaggcaatcaaacaccttttgagtacataggaaagagtgatgcaaaaagcaaggaatggactgattttaccagctatgtaacaagttttgcaagcatagaaaagcataaaaaagaaaagctgctgctggaaacctttaatgaaagagaacaggagttcagggatagaaatgctaatgataacagctatattgcactgtatgtaaaacgttatctggaagacggcatcgattttggcaaaagtttgcatacggaaattaaaaataaagtgcaggtgcgcagcggtaatgtgacggcatttttgcgccgtcagtggggcttggaaaaagacaggacggaaagtgataaacaccatgcgcaggacgcaatcgtaatagcctgtgcagcgcaaggcatggtgcaggctctctcaaaaatttcccgtaaagagggggtagtgcatactgatgctgtgcatagaaaatatgctatagctaagccgtgggataattttagaaatgatgtgttgacagctttggaaaaggtttttgtttcccgttcaccacggaaaaaagcaagcggggaaatccacagtgagacaatttataccttgaatgaaaagaaaaaacagtttgaagcaaaaaatgcaaaatccggtttttatgttcgcggcggcatagcaggaaatggcgatatgcttcggactgatgttttttgtaagaaaaataaaaaaggcaaagtgcaattttatcttgttcccatttataaaagtaatttgggtaaagaattaccgaataaagctattgtcgctaataaaaatgaagatgaatggacagtcattgatgaaagtttttcttttatgttttccttatttttggatgacttaataaaagcacaaaaagatgaaacggttacttttggatattataagggcgtagacagggcaaatgctgcaataacaatagaagtacatgatagaagtcaggataatgccagaattggcacgaaaacacttgatagtattaagaaatatcaggtcaatttattaggtgaatattttgaggtaggaggagaaaaaagacaactgttaacgcatgaagaataa

SEQ ID NO: 112 - DNA, 3042 bp, unidentified
  misc_feature 1..3042: note = Synthetic sequence or unknown origin
  source 1..3042: mol_type = other DNA
atgggtaaaagagtatatgcattcgatttaggtaaagcaagtatagggttttgtgccagagaagattttaacatattggaattgggttctttaattgttgataaagatcatgcagaagttatttcaaatcgtgacaggcgcagggtttataaaactttatatgctcataaaaacagagaagattttttcaacaaattatggtctgattgcgggttaaatattttagagaaagatgacaaaaaatttactactgaattttcaaaaccaaatgataatactatttataattccgcattattgagaattgcgttattacaggataaacaattagaagaatggcaaatatacaaagcattacataatgcaatacagcgtagaggatatgatgctgatattgcttgggcaaatgcatcatccgcggatgaaaaagataatatagaacgagttagcaggtatacacaagatgataaaggaattgaaataattaaaaatgaaaaattcaaatatccttgttattatgatgctctcagcttgagtttgtgggaagaaaataatcccgcagagtataaaaaacatcttccattagcagatataacaaaagtcagaacaaaaggtcttgttgcccccagagcttttgttgaaaaagaattaacagaattattttttaaagctcaaaaacaacttcctcaattaaacaaatattctgttgaatattttttatatggccaatatggcagcgcttatgcaacttttagaaaacctgaacagggtaaggaaaaagactacggagttttagggcaaaaaattccaagatttgacaaccgtattattgccaaatgcaaacttttaccaaaaagaaatgtttgtaaagcaaatactaaagaaaatgtgtcatttacattattgatgaagctgaaaaatttacgatttacagattctcttggcaataaatgtatgcttgattctgaagcaataaaagaaatttttaataattggttaattaaggcaaataagaatgatattctgaaattagatacaactataacaaaaaaagagatagaaaatgttatcggttgtaaaatacaggataaaattgaaccgttaaaagcaaacataagtggtcgttcatcgttttgccgcagagcatgccaaataatgaataagattattttggaaggcattcaaaaccctgcgacaatggatgttgctgaatttactgatgacattaatagtgataacggtataacggaggctgaaattcgtgaaatgttgtcaaaaatcgggacttgggataatttatatattcctgacaaccgttatgaaatggcagaattatcttcagatgacaggcaaaaaacggatttcctaatcggtaaaattacaaatccgatagtaagaaatcgtttgcaaatcctgagagataaacttcttgaattaaaagataaacatggtattcctgatagtattatatttgaatttattcgtgatggtgcagataattctttatatggtgctaaaaaagcaaatgactatctgaaaaatactaaagaaaatgaaaaagaaaatttagaaataaaaaaagaattagaggatgcaaatgcgtattctccgtcaaattttgaaaaattaaagttattaagaatgcaaggcggggcttgtatttatagcggaaataaaattggtatcggaaactttgatgaatgcgatattgatcatattttccctcgagcaaaaggtggtaatgatgctttatataacagggttctttgttacagcaagctgaacagagaaaaaggcgacagaactccttatgaatggctttcatcagacagagaagaatgggcgaaataccttcttcacttaaatgatttaaaatcaagtcttgggaagaaaaaatttgaacttttaacatgtaaaccgcaggattgtgaaaaacttatagaaagttataacggtcttgtcgaaaccgcacaaatcgcaaaagttgcgcagcaacttgctgcttttattttcggctgggggcttcaaacagaaggtgataaaaggcatttgtttgtaaacaacggctcaactactgctgcaattcgtcgcagatatggtttgaataaaattttgggaaatgatataaagaaaaatcgtgaaaatgacaaacaccacgctcttgatgcaatttgtataagcttttcacaagattttaaatatgacccgaaatctaaaaaagatgttattcaagattttacatacgattttgttaaaaatgcaattgataaacttataccttatccgtactcaaatgataaaccattcaagggtaatacaagacctttagaaacaatttacggttacagagaatatggagaaaaaaaatatataacaaataaaattgatataagcactttagaacaaaaagaaaagaaaataaaaacaataatagatgaaactataaaaaatgacttgttgaataaaatgaatctttccaaagaagattggaaaaatatgcttcaaaattatatccatcctaaaaaacaaacacatgtaaataaagtaatggtaattgtttctgaggggaaattagattttgataaaaacggtcgggcaagaatgaatgaatatgttgattttggtacaaaaggtgtaaaaaatcaatttaaacactcaaaagggcataaagggcaaattctttattacaatgaaaaaggtgccataaaagtaatgcctatttatgcaaatcaaaaaacattggatgtaaaactcaaattgcttgatatgggttgcaatctgtataaaaaaggcataattttttcatcaggctgtttggttgaaattccaaatgattttgaggcaaatgtttattatcatttagcagataatgatgggaaagataaattagttccaacaaaagaaaaagtcaataacggaatattcaaaatacgaacgattatgtcggacggtaaagttaaacttgaaaataataatggtattgagatactaacaaatgctgcaactttagttaatgccaattttcacaaatataaaatttga

SEQ ID NO: 113 - DNA, 3051 bp, unidentified
  misc_feature 1..3051: note = Synthetic sequence or unknown origin
  source 1..3051: mol_type = other DNA
atgaaaaagattctaagtctggatattgggataagttctatcggaaatgctgttgtcgaacttgatgatgaaaatttttacgggaaaatacttgatgccggagttagaattttttcagcagcagaacaaccatctggagattctttagcagccccaagaagagaagcgagaggagcaagaagaagaatttcaagacgttcaagccgtttatataatataaaaaaatatttaatcttaaataactttataactcaagaacaaattgaaaatttatattgttcaaataaacaaattaaagatgtttggactttgagaaaagaagcactatatcgtaaactgaataatgaagaattttatagaattcttatgcatattgcaaaaagaagaggtttcaaatcaataagaaaatcagaagaagcaaaaaaagaaggcgacttattaaaagcaataaaacaaaattatcaggaatttgaaaacgggcagtataaaacaatcggagagatgtttgcagaaaaggatataaaaagaaataaaagagaaaaatataataattccattccaagagatcttttgcaaaaagaaattgaaataatctttgaaacccagagaaaactcgggtctccacttgcaaaagaagaaacagaaaatttctatctacaaacagctttttatcaaagaccactgcaatcaatggaagataaaataggatattgttcattcgaacctgatgaaaaaagagctccaaaatgtgcatatacttcagaaatttttacagcggcaacaaaacttgtaaatctgtctataactgatgaattaggagaatgtagagtcctttgcggagatgaaattaaacaaattatagagcttgctcacaaaaacacaaaagttacatacaaacaactgaagaaagaattatgtttggaagataatattttatttaacggactaaattacaacaaaaaagacaaaaaccctgaagactcaacattaattgaattaaaaaattatcacttaataaaaaaatcaatagtaaatgataaaaatttaggaaaagtgtactttgaggcaataaaatatgataaggacctgttcaataatattgctactgttttaacctgtgaaaaaagtgatgagtcagtaattgccagaatgaaagaatattttattgatgataaaattatcgcttgcgtaaaagacttatctatgagcaaaactatgcatctttcgctgaaagcgatggaaaaaatattaccctatatgctcgaaggatataagtataatgaagcctgcgaactggctggttacaatcatcattcgatttcaaaaaataaaacaaaacaaaatttcttgcctgttttacctcaagaagaactgacaaccaatcctgtagtaaatcgagcaatttctcaaaccagaaaagttgtcaactcattgataaaaagacatgggacgtttgattatattattatcgaaatggcgagagatttatcaaaatcatttgatgaacgaagaaaaataaaaaaagctcaagaagattttcaaaatcaaaaagaactggcaagaaaaagatgtatagaaaatggattaaatccagattatccaaagagtaatttattaaaattcagactatgggaagaacaaggaggatattgtatttattctggaaaatacattgacccgagaaaacttagcgaccaggattatacagatgtagatcatattattccatattcaaaaagttttgatgacagcctgaacaataaagttttatgcctgtctgatgaaaacagacaaaaaggaaataaaatcccatatgaatatatcggagaatcaaaatggtatgacttcgttcaaagaataaaaacctataatttaaaatcagcaaaatacaacagactcatcagaaaaagttatgaatcagaaggatttaaatcacgcaacttaaatgatacaagatatataacaaaattcattaaagactacataaaagaaaatcttgattttggaaataatcttaaagttgaaactcgaaatggttcactgacagcatttttaagaacacaatggggactgattaaaaacagagaagaaaatgacagacatcacgcccttgatgcaattgtcttagcgtgctcaacacaaggcatggtacaatatttatcaactgtctctgccaaaattgaaaactacaactatacaaaagataaaaaaccaagatttaaacgtccctgggctacctttaaagaagatgtagaacttgctatctccaaaattttcgtttcaagagctcttagagcctctgtctcaggacaattacatgatgcaacaataagaagccctaaacaccttcaagatgggttcactgtactaaaaacacctcttgaaaaaattaatctgcaaacactagaaaaaatgtatgacaaagaaagaaacataaaaatatacaacctccttaaagaacgtctgacaaaattcaataacgacccgaaaaaagcttttgaagagcctgtatatatgcctatgtcagaagaaaaattgaaacaaggacaaaaacctcaccttataaaaacaataaaaattaaagacaacagtatatcaggaataaaagtgcataacggtttcgcacaaaatacatcaatgcccagagttgatgtattcacaaagaaaaataaaaaaggtaaaaacgaatatttccttgttcctatctacatcgctgattttggtggagagctgccgaacaaagctatatcaacaggaaaaaaccgttggatagaaataactgatgactacacattctgctttagcctatatccaaatacattgattgcaatcaatccaaccggcaaacctgaagatgagttcctcggttattacaaaggctgtgatattacaaccggaacaataaaattagattctcatgacagaacaataaaagataaacgtatctcaacaaaaacagcagcgtatataaaaaaatatcaggtcggagttttgggggattatcatgaagtgaaacatgaaaaaagactcaaactcaaaggaccaaaataa

SEQ ID NO: 114 - DNA, 3075 bp, unidentified
  misc_feature 1..3075: note = Synthetic sequence or unknown origin
  source 1..3075: mol_type = other DNA
atgatcaccttgggcttggatttgggaatttcgtcgatcggatgggcgatcttgagtgaaaatgccgccaaacgggaacttataaactggggcagcagaatctttgaaccgggagttgaaggcactgaaaatgaaatctctgccggcaaaggagtatcccgctgcgccaaccgccgtttgaaaaaagccttgcggacacaatatttccgacgcagaaaacgcaaaaaggatttgatcgatcttttgatcgccaatggtctgctcccggaaaatgttgattcggcgttttttgcagaaattgacaaaaaacttttgatgctgtttccggttgcagaacgtaaacacattggtcatgtgctgccgtatttttaccgtaaagcagccttagacagagttttggaaaaatatgaattgggcagagccctataccatcttgcccagcgtcgcggatatttgagcaaccgcaaacaggaactcaaagagcaggatgccgccggggtggtaaaaaccagaatcaacgaattaaagcaggcaataagcgaatcaggagcaagaacgctgggcgaatattttacgatggttgaccccgaagttgaacgcatccgttcgcgttatactgaacgctcaatgtatcaggatgaattccgcaagatctgtcagacacagcgcgaacatatttctgcagagttggaagaaaagctttacaaagctgtttttcatcagctgcctctcaaatcatgcaaaggtttgatcggaaaatgccggctctatccggaacaccgccgctgttccatggaaaagcatgaagcccagttgttcagaatttacaccagtgtaaacaatttacggataacatgcaaaaatcaaatccgttcgcttaccgaagatgaacgacttaaagtaattgaaatactcaatggctattcagatatttttaccaaatccggtaaagtcactttggcgaaactgcaaaaagccgccggattggcaaaaggtgaaaaattcaacctgggagatgatgaaaaagagatttacggcaatgagttgaataatattctctatcgggcattcggtgataaagccgcagaaatgcagcaagctgaacaggataaattcttcaatgatctgcgttcgatagaaaaaagtcatgttctgatcaaacgcctgatcaattactggcaaatcagcgaagaaaaagccgaagatattgcatctattgccttgccggataattattgcgcttattctctcaaagccttacaggaaatgctgccggatttagccgccggagtgacacttccgcaatggctcaagctcaacaatcacacacaaattgccgacaaggaatttgaactcttaccgctgttggatgattgcagttttgaattgcgtaatcccatcgttcaccgggtattgaccgaaatgcgccgggtggtcaacagcattgtcgagcgttacggcaagcccgaccgcatccatgtagaactggcacgcgatcttaaagctaccaacaaagaacgcgaacaaatcaccatccgcaaccgcaagcgcgaaaaagagcggctggcgatcgctgaacggatcgccaaagaagccggtctggaaaaaatctcccgcaacgatatactcaaagtcatgcttgccgatgagtgcgattttacctgtccgtattccggggaacacttctccatgagtgacttgctgcatggcggcttggtgcatatcgaacacattataccttattcgcgctcttttgatgattcttttgccaacaaaactttgtgtataaacaaactcaatgctcaaaagagcaataatactccgtatgaggcattcggcggcagtgctgaatattccgaaatgctggaacgggtcagacacttcaaaggtccttatgccgaacgcaaactggaactgtttgaattgcagaaagtcgaaccggcagaatttctggaacgcaatttgaacgacacgcgctatgccagcaaacttgccatgcagtatcttgccatgctttacggtggcatggtcgataaaaccgggaaacgccggatctatgccattgccggcggctgcactgctttgatccgccgggcgtggggcggcaattacctgttgggtgaaggcgaaaaagtccgcgacgaccaccgtcatcatgccattgacgctatgaccatagctttaaccacccccggcttggttcaggaagtggcaaaaatgtcgccggaacgccgccgggaattcaacgatgccactcaaaaatttatcgacagcagtttctatcagcaggctcatgccatgcttgatgattgtgcagtatcgcaccatgtagtcaacaagatgcgtggggctttgcataaagaaactatttacagcaaagattacagcaacggcgaaaatatccgccacgaacgtgttgaactgaaagctcttaccgccaaggacatcaaacaaatcgttgatccggcgatcaaaaatattattctcgataaactcggggttgccaatgattacgaagtaaccgatgccatgctgaagattttcggcgacgaagccaattatcccgccatgctcgaccgcaacggcaatccagttaacaccataaagaaagtacggatcgcccgcaccgtcaatacccggactgtcggcaaaggcgacggcaaacgcgaagtggcaaacggagccaactacatattggcaatttttgccaagctcaacgaaaaaggcgaagaaaccggctgggagggcgaagtgatcagcctgatggatgccgtacagaaaaaacagcgcaacgaaccactgttcgagaaaaaccgcccaggcatgaaattcaaattcagcttgcaaaaaggcgatatagtaaaattcaccaaagatggtgaagaaatacttggaataatcagaggcgtttcgttaccacaattttactgttgcccaattaaagatgctcgtaaagttcaagacttaaaggctgatcattgctggtttacgcccactatcagtgccgcatttaactggaaaatgcaaaaatacaatatgaatgttttcggggagctgcagatagctaatgactga

SEQ ID NO: 115 - DNA, 3096 bp, unidentified
  misc_feature 1..3096: note = Synthetic sequence or unknown origin
  source 1..3096: mol_type = other DNA
atggttaaaatattgggtcttgatattggtatttcatcagtcgggtattccgtaattgaattggacgaaaataaatttaacggcaaatttctggcattaggtgcaaggatatttactgcagcagaacagcctaaaacaggcgcctcacttgctgcaccaagaagagaggcaagaagcgcaagaaggaggttgtccagacgaagctgccgcctgtataacataagaagattattattagaaaaacaatttattacacagacagaaattgccgaaatctatgatacacacgaacaattaacagatgtctgggatttaagaaaagaagctctaaacagaaaacttgataataaagagctgtatagaatacttatgcatattgcaaaacgcagaggttttaagtctgttagaaaatccgaagaagcaaaaagggaaggtgaattattaaaatctatagcagaaacaacggaagaatttaaacaaggcaaatacagaaccattggtgaaatgtttgcacttaaatatacaaatggcgaggcaaaacgcaataaatccggcaattacaacaaatccattgcaagagatttactaaggcaagaaattgaaataatatttgaaatgcagcgcaaactgggctcaacaatcgcaaataatgaaatcgaaaaaggctataaagagatagctttttatcaacggcccctgaaaaccatcgagataaaaacaccctgtccttttgagccggaagaaaaaagagcaccgaaatgtgcttatacatcggaaaaatttagcgccttaaacaaacttgtgaacctgcgcttaataaacgatttgggcgataccagatttttagcttccgcagaaataaaagatgcagtccgattggcaaataaactatcaaaagtaacatataaacaattgcgaaaagaactatatctggacgatgagatcaggtttttaaacttaaattacacaaaaacagactccaagggtcaacaagtcgacccggaaacggcagtattgattgaattcaaaaactatcactcaattagaaaagcactggagtgcaatggaaatttagggaaaatatatttcgattccataaaagatgatgaagacttttttgacaacatagcttatgtattaacctgtgaaaaaacagatgaaagcattgaagaaaagctgaaagaatacggctatagcgcaggagttatagatagcataaaagagctttctatgagtaaaacttcccatctttcgctaaaagcaatgaaaaaactgattccatatatgctggacggtaaaaaatatacagaagcctgcgaacttgccggttacaaaaccgaaaatcaaaatacggcaaagcagtcattactgcccgaactcagccaggaagagcttactgtaaacccggttgtaaacagggcaatttctcaaaccagaaaggtcgttaatgctttaatcaaaaaatatggaatactggattcaatcattatagaaatgtcaagagatttatcaaaaacagcgacagaaagacgcaatattcaaaaattacaggaagaatttaaatcagaaaaagaaaaggcgcgccagagatgtcttgaaaacggattaaaccctgattttcccaaaagcaatttattaaagttcagactatgggaagaacagggtggtttctgtgtatattcaggcaaacatattgaccctaaaagactgtccgagcaggattatgttgatattgaccatattattccgtattcaagaagctttgacgacagtttaaataacaaagttctttgtctgactgatgaaaacaggcaaaagagcaataaaataccttatgaatatattggtgaagataaatggtatgattttgtacagcgtgtaaaatcttaccatctaaagcaaccaaaggttaatcgcttaactaagaaaaaatacgaacaagagggatttaaatcaagaaatttaaacgatacaagatatattgccaaatttgtcaaagactatataaaagaaaatcttgattttggcaataatttaaaggtagaaacaagaaacggctcacttaccgcttttttgcgtaatcaatggggacttataaaaaacagagatgaaagcgacaaacatcatgcgcaggatgcagcagtaattgcctgttctacacagggaatggttaaatttttgtccacagtttcggcaaaacttgaaaattatgattattcaaaagataaaaaaccccgtttcaaaagaccctgggaaactttcaatcaggatttagagtacgaactgagccgcgtttttgtctcaagagcagcaaaaaagtctttcaggggcgaacttcatgatgcaaccataagaagtgtaaagcaccttgacaaaggctttactaccgtgaagaaacctattgagcagattgatttaaaaacattagagcaaatgtttgataaagaaagaaactataaaatatacaatctcttaaaagaaagactggagcagaataacaataatcctcaaaaagcttttcaagagccggtatatatgccgctttcaaaagaaaaagaagcaaaaggacaaaagccccacagaataaaatccataaaaataaaagacactggtacatcaggcgttcttgtaagaggcggtcttgccaaaaatgcctctatgccgagagtggatgtttttactaaaaagaataaaaaaggtaaaaacgaatattttcttgttccgatatatgtatctgattttggaaaagaactgccaaataaagctattacaagcaaaaaagactgctggctggagataaacgatgaatacacattctgtttcagcttatttccggatactcttattgctattaatccgacaggcaaacctgaagatgagtttttagggtattacaaaaaatgtaatatcagcaacggtgcaataatccttgattctcatgacagaagcattaaagaaaaaggctttggttcaaaaaaacttgtatacataaaaaaatatcaggttgacatactgggcgattaccatgaagtaaaacaagaaaaaagacttggaataaaaccaaaacaaaaaggtcaacaaaaagatggggtataa

SEQ ID NO: 116 - DNA, 3108 bp, unidentified
  misc_feature 1..3108: note = Synthetic sequence or unknown origin
  source 1..3108: mol_type = other DNA
atggaaaaggtttttgcttttgatgttgggaccgcatcgttgggtattgctgtgcgcaaagattttgatatgattcgttatgaatctttgttgttaccccaagaggctggtggaatggatgagcttcgagaggctcgcaggcaatatcgcacaagattagcacacgcggcaagagaggcatattggaaaagaatttgcgaggaagctggaatagaagtcttgcattcccgtattcatggtgatgcatccttacatattccatcgtcaccgggagatcctcgattggaacgagaatttgcagcaccgggggatgagacaatctatacgtcttgtttgttgagaattaaacttctgcaaggtgcaaaacttgaaggatggcaggtcttcaaggcggttcgttccgctttgcaacgacgaggatttgatcgaaatgtgccatggaaaaatcgtgcggcttcaaagaccaatgccgatgatgattccaagaccgcaaagaatgcgatggaatacgaaaagatgctgttggaaattgtgaatcaacaaagggaatatttgtatccgtgttattttgatgcctttcagatggggctgtggaatccccgtaacaaccaaatattactccgcccgtcaaagatatcgaatcgtgcccgcggttatactccccctcgcgaattagtgatcgcagagttgagtgctttgctacaaaatgctgcaaagcttttcccaaagttggttggaaaaatagatgaagttctttggggaccaggaaaagaacagtatgcttccttttttgcagaaaaacgcaatgcgcttcatctaaaggaagggagtgctggcgattgggaatcgttacttggacaaaaaatccctcgttttgataatcgtcaaccgggaaaatgtgcattgattcctcgtttccacgtatgtcaagcaagcgatactgcgataattgaatcaacttttttgctcaaagtaaaaaatcttcgtgtgctttctccagaggggaaagaggttttcttttcgccggaaacgatacgagttattttagatacggcaagaattaaggcacgagcaaaaagggaagaattgcgtttagcgcaagcagataaagaagcaattcaagcggcagtcgcatctgcctataaaatcacaaagactgacttgaaaaaaacacttcgcagtatgaaatatgatattcttcctggaaacgaagaggtcgaagcacctaaaatttccggacgggcaagattatctcgccctgctgcaaaaattatgcgagatctcattttgagcggagaatcgcctcgggcgttttatcagaaattgctccaatgtccgcctaaagatattcctggtgccacgttatctgatgacctgcagtttttgctgatgatgccagatagttgggagggaattcatattccggatatggcaggcaaaaaaattcaagagagtgctcaatctccagatgatctcgtgcgacaattgattgctgaacagaggagtccaatcgttcggttgcgattggagatttttgatcgagagttgaaacgacttttggatgatccagcaattggtaagcctgatcgcatcgtgatggaatttgtacgaggagattttctcggagaagaaaaaaagagaaagcttgaagctgagataaaaagacgccataaagaaaatttagaaattcgcactactgctacggaacaaggttatagcagcggaacagaccttttgaaacttaagttgctcaaagagcaagcatacgtgtgcccttatacgggagatgttctttcttgctttgctttggaggatttggaagtcgatcatattgttccgcgccatggcggtaaaaacggttctgatggatttacaaataaagtcgttacaagccgaacgaccaatcagttgaaaggcgcccgtaccccatatgaatttttgcatggttcagggaaatggacggcgtattgcaatcgggtgatggcgatgaaagtttccaagcgaaagcaacgtctgttgttgtctcctgatgcagaaaaactcgatcaaaaatattcggatctttgctccacggcatggattgctcgcgtttttcgggatattgccgccgttcgctgttgttggccagaaggagctataggaagcgaacgtcatattgttgtaataaacggcgcgataacggctgcgttgcgtcgtcgttatcgaattgattcattgcttgctcctgaatgcaaaagtgccgatgaaattgaaaagaaaaatcgcgatgataagcgtcatcatgcacttgatgcaatggttttgacatttacgactttttggatgcgtaatcctgctttgcgagataaattggcactgccggacaaaatagatcgatattatttccagaagtacatcgatgaggttaatcctcgtaatatcatatttcccagagctggattggaaaaaacgatttacggaaaaagagagattgatggtcaaagcaagatgactaaaagagaagacattgtttcttttggtattgataacaaggggaaatttgttgaaaaatcggtgctctcaaactttagagatgtatgcgatgaaaagttacgttcgtatttgcaaacatcctttgcaaatgcaaaaatagacagcactgaaaaatggatgttttggtgtcaaaacttaaaaagcccagataccgggatgccgattaaaaaggtgagaattgtaaaaggaggcatcgaggaatataaaaatctttccaaagacggagatgtttttgggggacaatatcgcaagggtgatcagcacaaagggtattttgtttatcttgacacaaaaaacaagcctcgtgttgcaccagtctatgctcatgcttctgtttcccttgagcgcgaaaaattatgcaaacttggttttactgttgttgatttttttcaaagtggctgcagtgtggaaataaaagttcatgcgatcagtggaaaaaatcacgtttcgcccggtgtttatatgcttacttcaatctggacgcagggtacaattgcgctctttaaaaatggagaaaagtatcttgtcagcctttcgtcgatttctgatattgcgtcgaatctaaaaagatgttag

SEQ ID NO: 117 - DNA, 3315 bp, unidentified
  misc_feature 1..3315: note = Synthetic sequence or unknown origin
  source 1..3315: mol_type = other DNA
atggaaaccaaacaaactacaaaattgaggtattctctcggtcttgacatcggaagcgaaagtgtcggctgggcagtgattgagcttaatgagcatggccagcctattgggctggttgacatgggtgtaagagcatttgatgctgtaagacaggaacagcagaaagcaacaacgcccgctcaggaaaggagagttgccagaagtcaacgtcgccggctgaggaacaagaaaaagagaaagaaaagactaatcgaagcctgcataaattacgggttgctaagcaataaacaagaagctgatgcgtgtttggtcactttgccaggtgacaaatctccatgggatttgagggttgaaggtcttgatagaaagcttgaccgtagggaatggttcagggttctttatcatctggttaaccaccgtggctttaagtccttcaaaagaggtgaggacttagaaaaaggcagaaaagatgatgttaaaaagatgaaggcagcagcaaagcaattgagtagcgaatggagagacagaggctatcgaactgttgcggagtttttgtgcaacgattctgattggatttctaagcatggcttaaggaaaagaaacaaagagggcagttacgagttcaccattttaagagatgatcttgtagaagaggcaaagcttttgtttgagcagcaaaggcgctttggtaacgagtttgcctcagctgtttttgaaacagaatacattgacattctcgatgaaaagccccgtttgcttgagggtgaagatttaaaggcgaaagttggttattgcacctttgagcctgacgaaaggagagcgccaaaggcaacctttactgcgcagaaattcagagcccttcagattattaacaatctcagattcattaatcccgaaactggcgaaatcaaagaaagcctgacctctgacgaaataaaaaggctttttaatttggctctcaatcgcaaggaggtaaaagctgaacaaattttaagggagcttggtttgcggggttggttgattgaaggctacgacaaaaacaacgaaaaaataattgtgcttgaagattttcacaagcttaaggaagcactagaaaagaaatttcctgaaacctgggggaaacttttgaccgatattgacctttatgatcaggttgcatcaattttaacttattatttagcgccggagtctacaaaaagagagctgcaaaaattgcagcttgacgacgaagttattgatgctcttttaaacgtttcttttaaaggccacgccagtctttcgctcaaagccctcaggaagattattccttatttggaacagggttataaatatagcaaggcatgtgagcttgctggttatgatcacagagccctgccggagaagcacaggagaaatcatattccgccttttgagagtgaggagttcgataagcaactcaaagcagaatactttggtataaccaatccaaatgtaaagagagctctggctcaagcaagaaaggttgtaaatgccatagtccgtcattatggtattccttcaagaattggtattgagcttgccagagaaatgacacttagccgaaaaagaagggaggaaaccagactcaacaatgaaaggcgtaaagaaagggaaaacatcatcaaaaagctaaaagaagagcacaacgttgacaatcctagtgcaaaactggttgataaatatatactttatgagcttcagggtgggaagtgcgcttactccttaaaacaaatagatttaaatcgcatgattcacgatccgtcttatgttgaaatagaccacatcataccaagaagtatttcctttaataattcattttcaaacagggttctggttcttgcctcagaaaacaggaacaagggagaccgtcttgcagctgagtatgtaaagagctactatggcgaggaacactacaataaatgtttggctttgtttgaggaagctttaaaaaaaccacacgatcatagacatagaaaaagagagctggctttaaaattaaaactttttaaaaaggaaagccttacagatgaggaactggtggaattcagagagcgctaccttataaatacaaggcatgcagcccgctttttcaaaaaggtgctttgtgcatacctcgacatcgaagatccaagagttattaccataaatggcactataacacgtgatctcaggcatttgctcggagtagaagacctcaaggagggaagatttagtgacaaacaccacgctgtagatgctactatatgtgctatttgtgatttttcaaccgtttacaagctctcaaattattacaaatacaaagatggcttttacaagattgatggcgatacactaataagccagaatggtttgcgccttaagcttgaagatcttgcctggccttctttcagagaggatattgtaaagaggcttgagaccctggtggtttcccgtgcaccaaacagaaaggttacgggcagaggtcatcgggatactatttattccttaaaacacgtcaaaaaagtagtcgatcttcctgaaaaagggaaaatttcaataagctctgatgcaccaaggccaacaacccgcgttagacttgattctctaaagcccgaacagataaaggcaattctcgacaatccggaaaaagttctcgttgattatcagagtaactatcttctctacgagcgcataataaaaagactaagagaaacagaaccagatgacggaaacaaggaaaggtgggcagtgcttgcttttggaccggatacagaaccaatccgggtaccttcaaaagatggcaaggaaggtccggttgtaagaaaaatcaaaatattcacagatatcctttcgggtgtggctgtaaggggagggatcgcgccttacgacaatatagtaaggcttgatttctatagaagaaaagaaaaaaacggcaggtacaagtattatgttgttccagtttacgctgcagatatagccatgggaattgtgccggataaggtagctaccacaggaaaaccggaatcagagtggaaaaagcttgatgatagctttgaatttcttttccacatttttaagggcgattgtctgcgtatctacaaagacttaaaagaacctcccacagacatgtactttacttcttttgatagaaatactgtaagattgaaaggaaattacctagacaggtctaataagaataagcaggggaaaatcgtaacagttgaggagtcaatcacgaatgcagctagaattcaaaagctccacgtggacattctcgggcgtttgtccgtcgtggaaaaggaaaagaaggttttttag

SEQ ID NO: 118 - DNA, 4119 bp, unidentified
  misc_feature 1..4119: note = Synthetic sequence or unknown origin
  source 1..4119: mol_type = other DNA
atgggaatcaaaggggaatattatttaggattagatatagggacgaattctgtgggatgggcggttacaaatgaaaactatcaattactgcgcgcaaaggggaaggatttgtggggagtacgtttatttgatgaagcacatacggcagaagagaggcggggatttcggattgccagaaggagaaggcagcgtgagacggcacgattaggaatgcttagagagcttttttcagaagaaattgataagatagatccgggctttttcgcaaggctggacgagagtagattccagatgcaggagcgtgcagaggaaaataagcagacgtatgctatatttgcagataaggaatatacggaccaggattattatagagactatcctacaatctttcatttgcggagagaactacttaagtcaaaggagccgcatgatatacggttggtttaccttgcattggcaaatatgttcaaacacagggggcattttttaaatacatctttgcgggcagaagaggacaaatatagtttcagggatgcttgtcagttcctttcagatcaggcagaagaggcagggataaattttccgctgattgaacagccgggggagctggaaaatcttcttggagaaagaggtttgtccagaaagaacatgttagagcgtgcgtcagaactgacaggaatttctaagaaggataaagaagcatatcatattttaaaactgatgtgtggattggaggcaaaactcacagatatttttggaaaagagatgattgaggaagaacataaaaaacttggaattgcttttagggcggcagactatgaagaaaaggcggaagagattaggataattattggtgatgaaaaatttgaaatgattcttgcggttaaagatattcatgataaaggactactttctaatattatgaaagggcatcgttatctatcagaagcaagagtagaactatatgaagagcatcaaagggatttgaaaaagcttaaaactgtgttgaaaaaatacaatccagaagcatatcatgatatgttccgtgtcatgaaagatggaaactatagtgcatatgtcggcagtgtgaatagctctgatacagtgataagaagaacagggaaaggaaggacgcaggaagcgttatataagacaattaggagtgctttaaaggaattgccccaagacgatttagatgttgtgaatatattaagcagaatagaagcagaagtatttcttccaaagcagcttactgcatcaaatggcattattcccaatcaggtgcatgaaaaggagatgcgggcgattttgaaacaggcagaaacatacttgccatttcttatggaaaaggatgattctgatttaacggtttcagagagaatatgcaggattttttcttttcatctgccttattatgtgggaacgataggaccggaaaacagggacaggatagaatatcatggatgggcagaacgaaaagcgccaggaagaatttatccatggaatcttgaagaaaaaattgacatgaagggtactgcaaagaattttatcgagagaatggtgagacattgcacctatcttacgggagaacgtgcgctgcctagacaatcgctcttatatgaggagtttgaagtgctcaatgagttgaataatttaaagcttaatggcgaaaagctttcggtcgaggtaaagcaagctatttataagcatttatttgaaacaggaaaaagagtttctatgaaacagttagaaaactatttaattgtgaatggatacatcaagaagggagagacggacgctatttccgggatagatggagatttccacagctcgctttcttctttagggaaatttaaggggattctgggtgaggcagtgcattatgatgaaaatcgtaagatgatggaggatattattttttgggggactatttatggaaaagataagagttttctaaaagaaagtatttgtgaaaattatggagaatgtttgtcagagaaagatattaaacgtattcttggattcaaatttgaggggtgggggaaactgtcaggctcatttttgaatatggaaggtgtgtccacagaagatggtgtaatacgaaaactcatcactgctttatgggagacaaatgataatttgatgcagcttctcagcgcaagatatacttattcagaaactttggcggataagatggagacggtggaaaaacctttagctgaatggacgatagaggatttagatggaatgtatttgtcagcaccagttaaaaggatggtatggcagactatgaagatcttcaaggaattggaaatggtgacaggggggacaccgaaaaagatttttgtggagatggcaagggaagaagggaaaaaaggagtaagaaaggaatcgcggaaaaagaaattaattgaattgtatcaggcaattgaaagcgaaaaagccttgtggatgcaggaaatcgaggataggccggaacaggtctttaggagtaaaaagctatatttgtattaccggcagatgggacaatgtatgtacacaggagaggcaatcaacttcgatgatttgatgaacgataatctgtatgatatcgatcatatttatccgcgccattttgtgaaggatgatagcattgagaataatcttgttctggtaaaaaaagaaaacaatgcacataagagtgatatctatcctattgaagagaaagtgcaaagggaaatgtattccagatggcgctttttggcggataaggggtttataagcagagaaaaatttaatcgtcttacaagaagaacacattttacggaagaggagaaggcgacatttatcagccgtcagctagtagaaacccgacaaggaacgaaggcggtcacgcaaattttaaagcaggcttttcccgcagcggaagttgttttttcaaaggcaggaaatgtatctgattttaggaataaatacaagctttataaggtaagatgtgtgaatgacctacatcatgcaaatgatgcatacttgaatattgtagttggaaatgtttaccatgttaaatttacaaaagatccgcttcgttttatacgagaagcgcaaaggtaccccaatatggatatatataagtataacatggataaaatttttagctggaatgtggaacgaaatggagagattgcatggactgcatcgaaacgggaaggagaagatgcaggaacaatcttgacggtacgtaaggttttaagcaagagctcgccgcttgttaccagaatgtgcagtgagaatcatggaggtattacgcggaaagcgacgatctggagcgccgaaactgcaaagggagaaggttatattcctgttaagcaaagtgaccccagattacaggatgttacaagatatggcggtttgacggcagttgccggcgctggttatacattggttgaatataagctgaagggtaaaaaagtccgaagcttggaacaactccctgtttatttaggaagggtcgattcactcacagaagaagcaatgacaacttatttttataaagcaatatgcgaggaaaataaaggaagcgatatttctgatgtttgtattcgtaaaaaatttattccatataatgccttgttaaaatataatggatttttctattatcttgcggggaagacaggcagcagtatcattatgcgcagtgcggtacaggcagtcttttcaagtggggaaatgaattatattaagaagattgaaaaggcagcagcaactaaatattatgaagaaaaggaccagaggggaggactgattcttagcaaagataagaatcaggagttatatggtaggattaagagcaagtatcaaaacacgatttttcaaaataaaatgggaaaaatgggaagcttaattattaacggtgaggaacagttcggtcaattgatgctttctgaccaatgtgctgttttgatggaaattatgaagaactttaatacaggtgatggtgtagacatgaaattgattggaggaaaagaaaaaacaggaataacaacaatcaataaagtgatatcaaagagtgaagagtgcatattgatacatcaatctgccgcaggtttattcgaggcggagattgatcttttgaaggtatga

SEQ ID NO: 119 - DNA, 4473 bp, unidentified
  misc_feature 1..4473: note = Synthetic sequence or unknown origin
  source 1..4473: mol_type = other DNA
atgaaaaatatacttggtttagacttgggtacgaattccattggttgggcactggttcaaactgatgatgaagggaactatacttcccaaataaaaatcggcagcagaattattcctatgacccaagacgttctgggaaaatttgatagtggtgttactgaatctgctgcaagagaaagaaccgagtatcgaggtgttcgaaggttgcgcgagcgttgtcttcagagacgagaaaggcttctgcgcgtactccatgttttggatttccttcccgaacattattcttctcatattggatgggacagtacttcaaatgcgacttatggtaaatttcttgatgaatctgagccaaaaattgcttggaaacggaataaagaggggaagatggaattcatctttatggattcttttcaagaaatgctcaatgatttctctattcatcaaccggcacttgtagccgatggaaaaaagatacctcttgactggacattatattatttgcggaagaaggctttgagcaaacctattcggaaggaggaattggcatggattctgctaagctttaatcagaagaggggatattaccaacttcgcggtgaagaagaggaagagaagaaagaaaataggttggaggaatatttcaagttgaaagttattcgtgttgaagccacagatgagaaacgaggcgacaatgtatggtataatgttcacttggaaaatggttggatatatcggcgtgcaagccgtctgcctctgaatgactgggaagggaaggtgcgcgaattcatcgttaccacagacttggaaaaggatgggacacctaagatgaataaggatggagaagtaaaacgttccttccgttctccgaaagacgatgactggggattgcaaaaaatacgcacagagagagatattgacgcctccaacaaaactgtaggggaatacatatatgactcaatcctttctcacccgtcccagaaagtgcggggaagattggtgcgcaccattgaacgcaagttctataaagatgaactacgggctattatctccaagcaggctgagttcatttctgaattgtccgattctgtaatgctggaaaaatgcatcaatgaactttatcctaaaaacgagggacaccaatccagcctttttaggcatgatatgagctatttccttattgacgacttgttgttttaccagcgtcctttgaagagcaaaaaatcgctcatctctgattgtccgatggaaaactatgagtatgtggataggaatactggggaaatcaagattcaggccatcaaatgtgcagctaagagcaatcctttctttcaagagtttcggatctggcagttcatccaaaacttgcgcctaattgaccgttctgggttccaagaaacagatatcacatctaaatacatttctactgaagatgattatgttcgcttattccattggctgaacgaccaggaaaaggttacccaaaacaagcttctcggtgattacttcaagattaagaagcccaaaggaaaggatgcttcatatcccctgcgatggaactatgttgaagacaaagattatccatgcaatgagacaagatatgatatgctgcaagctattgagaaggcaggactctgcccagcattaatctctaagcgtgaggacgaatacaggttgtggcacttactctattctgttaacgacaagaatgaattacagaaagctctcgaatcttatgcaaattcaggtggaaggaatctgccagagtcatttgttagggaattccttaaaattaagccctttgagaaggagtatgcatcattcagcgaaaaagccattaagcgattgctgtcactgatgcgatacggttcaatgtggaatgaagaggctattgatgacaaaacaaaagaacgcattcgaaatatccttgcagggcatttagaacccagtatttccgagcgtatttcacatgcaggatttcatttcgaaaagattgaggatttccgtggcttgcctttatggattgccagttatatcgtatatggcagacatgcagaaagcagagatacggataagtggaatactcctcatgaaatgatgagttacatacgcagtttccgtcagcactcattgcgcaatcctgtcgttgaacaatgtattctcgaaactcttcgtgccgttcacgacctttggaaagaagtggatcatattgatgaaatccatgtggaaatggggcggagcatgaaaagtacggttgatcagcgaaggaggatgacggagcaggttattaggaacgaaaacacgaacctgcgcatccgacaattgttgcaagaattgaagaatgatgacaatattaaagatgtacgtccttattcaccaatgcaacaggacatccttcgcatctatgaagaaggcgcactaagcactttaaagaaggatgatgaagactatgccgaaattacccggatatcccggctggcatccccgactcaaagtgagatgctgcgttataagctatggttggagcagaaatactgctcgccatatacaggcagacctatttcattggcaaaattgtttacaactgcctatcagattgaacatgtcatccccaaagcacggttttttgatgattcgttctcaaataaagtgatatgtgaagcggaagtcaaccagctgaaatcaaatttactgggatatgagtttataaagaagaatggtgggcagattgtgcattgtcccacccttggagatgtatccattttgaaagaggatgaatataaagcatttattgcagacaattattccagcaatccgaacaagaagaggaaactacttatggatgacatccccgaggagttcatccaaaggcagatgaatgatacccgttatatcagtcgcttcatcctcgcccttctttcaaacgttgtacgggacgaggacgaaaaagaatatacttccaaacatgtcattccgtgtacgggtggaattaccgaccggctgaagaaagactgggggctcaatgacgtatggaaccacatcgttgccccaagattccagcggatgaacgatcttactcattctgacttgtttggccattgggaagataagaacggcaagcgtgttttccaaacagatatgccattggaactgcgccgtggcttcagcaagaaacgtattgatcatcgccaccacgcaatggatgcattagccattgcatgtgcttcacgacagataatttcctatctgaataatgagaatgcccaagacactgagcgccgatacgacctgcgtgcaaaactatgcggaaagaatcagctgctcttaaagccatgggatacatttacgcaggatgccgaagctgcgcttcagaatatcgtcgtatccttcaagaattatgttcgcgtcatcaacaaggcaagcaactattaccgacattacgatgagagcggacgcaaggttatggtcgctcaaacagcgaatgatcagtgggctgtgcgcaagccattacataaagaaactgtatttgggcatgtcaacctaaagcgcaagaaagaggttcccctagctaaagcactggaaaacccagacgtgattgccgataagaacctgcgcaaggctattcagggcatgcttgcggcggggatgacgacaaagaaggttctccagcactttaaggacattctgttttcattcgaagggaaaaacatacagaaagttgaagtcttctattttaccgacgataccgaggtgatggttgccacaagaaaaccattggatgagacttttgatgaaaagaggataaaggatatcacagatacgggcattcagaaaatacttttcaactatcttcaatccaaaggtggcgacccaaaagtcgccttttcacccgaaggcatacagcaaatgaacgagcaaattgccctgtacaacaaaggaaagaaccaccaacccattttgcgagttcgagtttcagagccaagaggcgagaaattccaagttgggcaaactgggaacaaaacgcggaagtatgttgaagctcaaaagggcactaacctttatttcgcaatctatttggatacagaaggcaaccgtagctactcaacaattcctttaaacatagtagtggaaagattgaaacaaggactctctccagtgccagaaacggacgagaaagggaatcgcttactgttctatttatcgcccaacgatttggtatatgtgccaacagaagaagaacgagaaaatcctgatatcagtattgacaagaatagaatatataaaatggtcagtgcaacggggaatgaatgtctttttatcaagtcgagtgttgcttctccaattgtaaacaagcaagagtttgggcctcttaacaaggtcggtcgctcaatagaaaatgattgtcccatgataaaaaatgtttgttggaaaatagtggttgacaggttgggtaatattataaaagttattagatag

SEQ ID NO: 120 - DNA, 3165 bp, unidentified
  misc_feature 1..3165: note = Synthetic sequence or unknown origin
  source 1..3165: mol_type = other DNA
atgtctagaaaatatggtattgggttagatattggtattggctctgttggctttgctgttatttctagaaccaacaaagaggatgcacgaattgaagatttaggtgttagattatttgattctggtgaaactaatgaccacaaagctagaaaaagtcaggaacgtagagcgcatcgtagtgttaggagacttattcgtcgtcgcgcacatcgtaaagaacgtgttaaaaatttcctgcaaaaaattaacttgattagtaatgataaactcaaagcttggcaggaacaaaacggcaaccaaaatatttttgcagttcgcttaaaaggcttggacgcaaaacttactcctgaagaaattgcagactgcattatccatatttgtaaccatcgtggttatcgtgaattttacgaagaggaaagtacagataaagaagcaggcgtgattaaacaggctttagcagaatttgaacaacgctttcaagatggaaactatcgtagcgttgcagatatgattttacatgatgaagtttttaaaactgaaactgcttttccggattatcacaatcataaagaaagtgaaagacatattttaattaaacgtgcttatcttgaaaaagagctgcttgaaattttaaagcaccaacaaaattattatccacaattaacagaacataatatagattttttgtgcaataagattgtttttgcacaaagggattttgaaactggaccaggtgagccagggaagatgcttaatagaaaaactggtcaaaaggaagaacaattacggaaatttttaggatttcttgattccattggcaagtgcatgttttacaaggatgagaagcgtgcatttagaagtaccgtgctttctgatgtttatgctttaataaactgtttgtcccaatttacctatgtagatgttgaaactggagagattgttttaccaaaagaagctgcttctgtaattttgaaagaagtgcttatcaaggcaagtgctactgaaaaagaacttaaagcacttttgaaacgttttggtattgagatgattaaaccaggcaaactggaagtaaaagctcctgatacaattaaaacattaaaaatcttgaaggcaacattggaagcaagtggttataactatgaagagcttattgcggaagaacaatttgatttagaaaatccgtctaagttgcaaagattatgcgtaattctttcagaaaacattactccgaagcgtagagaacgtgctttggaaagagaaggttggaacaaaaagcttcgcgaagaaatgaagcgcaaaaagtttggtggtactgccagtgtttgtgaacgttatatggttgaagccattaatgcattcttgaatggtgaaacttatggcaatttccaagcaagacgtttacaagagcgtgaagaagctacagaaattaaaactaaatataaaactttgcctgcgcttacgaaaaataccgatgaagaaattatagagaatgttgttgtctttaaagctatcaacgaaacacgaaaggtgcttaacgcaattattcggaagtatggttctcctgaatatattaacgtagaagttgccgatgaattagggcgtagctttaaggaacgcgacaagattagcaagatgaatcgtgataacgagaaagaacgtaagcaaattgtagataaaatagttcaattaggtttacgaaatgagggagaggtaaagaacaaagatattttacgctttagactgtggaaagcacaaaacggtgtagatttatatactggtagacctattgaagaaaatgaagtactaagtgagatttacgaagtggatcacattgtgccgttctctctaattttagatgatactatcaataacaaagctttggttagtagaacagctaatcaggaaaaacgacaaagagtgcctcgtgaatatcttgcagatgacgaagagtttatgaaacgagtaaatactctgtttaataaaggcaagatttctgcgaagaaatataagtatttaactttggaaagcctttatacaccgcaggcaagattgcttctggaagaatggaagtctcgcaatattaacgacacaagatatattactcgctacatagtaaattatttggcgggcaaccttttgtttgatagcgataaagctaaaaatgtttatgccattaagggtgctattacttctaaaatgcgtaagctatggcttaatagtaaatcttggggtaatgctgaaaaagaccgtgagaataatttgcaccatgcagcagatgctgttgtcattgccaatttgactcctgcttatgtagaaattgctagtgatacgcttaagttgcaaagtatatacaaagcacatcacaagcaagaaagttttgaatatacaacttacctaaacggtgctgtacgcaaaatggaaaaatattatggctttaatgaagcttatagtagaagattgcttgaagcaaaaggcaggattccatctttggtacgcaatttgtatgcagaagttgataaacgtttggtagataatagtttggaatttttccaagatgttacttgtgaacaatttgttgccaatgttaaagattactatcgtgatgaccaaatctttgcagaaagcttgtctatgcctttagtttcttataagcagaataaaaagtttcaaggtcaaattacagatgataatcctgtaaagcaatctcaacgcaaagatacttccattgctaagcttgatactcttggaaatgaaaatgttttgagtgccaacaagtactattgcattgagatttatagagataagcaaaataaaactgcattgcgtggtattcgttatgttgacttggttaaaaagaataaaaagctatatttagcaacaccgcttcccgaaaactacaaagaacatgtaatgtacctttttgcaaatgattatgtgcgtatttttgatggcaataataaattaaagtttgaaggatattatagaagcacaaaaaatgtaaatagaaatcttttatatattaggaataataatgtaaatagtgatgttattgtttcagtaacaaaaaatgataaagttataaaattaaatgttgatattcttggtaaactgggtggtgaagttaaatgttccgtaccctttatgttactgtcggagaaagactga

SEQ ID NO: 121 - DNA, 3165 bp, unidentified
  misc_feature 1..3165: note = Synthetic sequence or unknown origin
  source 1..3165: mol_type = other DNA
ttgacgaattatactttaggtttagacatcggtatcacctctgtaggttatggtcttattgatacagatacgaagtcagttattgatgctggtgttagattgtttccagaagcaaatgtagagaacaatgaaggtcgtagatcacaacgtggtgctagacgtttaaaacgacgtcgtattcaccgacttgaaagagtcaaacgtttgttgtcaaactatcatctaatggaagaatcaaatcctcctcacagcacgaatccatatcaaattcgagtaaaaggtcttagagaagaattaagtaaagctgagttagctgtagcgttactgcatatagctaaacgacgtggaatagacaatatgagtgtggatgccgaagatgacgcaccaagtgatggtgtctcaactaaagatgtgctagctaaaaatgcaaatgagctcagtcacaagtatgtttgtgaattacaactagatcgacttttagctgaaggtaaagtaagaggcgaacagaatagatttcaaactaaagatttaatagaagaagtgaaacaacttctcactactcaaaaaaattatcatacgttcgatgatgaatttattaatcattatattaaattagtacaacaacgaagagcttattatgaaggcccaggcgaaccaagtccttatggatggggcggcaatctcaaagagtggtatgagatgctaatgggtcactgtacatattttcctgatgaattacgtagcgtaaagtatgcatattcagctgatttatttaatgcattaaatgatttaaataatcttgttattcaacgggatggcgttccttacttagagtattttgaaaaattccacattatcgaaaatgtttttaaacagaaaaagacacctactttgaaacaaatagctaaggagattgatgtcacacctgaggatatcaaaggttatcgagttacaaagtctggtaagtctgagttcactaaatttaaaatatatcatgatttgaaagatattctcacacataaagagtatcttgaagataacgatttaatggatgaaatagcgaagatattaactatttatcaagattcagaaagcattaaagaagaactagaaaagttgacggaattatttactgaagaagaaaaagaagcgattagtcaattatcgagctacacagggacacatcgtttatcacttaaatgtataaattatgtccttccagatttatggaaaacgccatataaccagatggagttattcactcaattaaatttgaagcctaaaaaagtggaattgaagaatcagaatcacattcctacagaaattgtagatgaatttatactctcacctgtagttagaagatcatttattcaatctattaaggtagttgatgcagtaattcaaaaatatggtcaacctacggatataattattgaattagcgcgagaaaataacagtaaggaacaacgtcaatttattaataaacttcaaaagcaacatgatcaaacacgacaccgtattgaagaaattatgaaacaatacaataatgagaatgcgaaatatttatttgaaaagattaaattgcatgatatgcaagaaggtaaatgtctttattctctaaaagatattcctttagaagatttattgcgtaatccatatcattatgaagttgatcacattattccacgatcagtagcattcgataattcacttaataataaagtgttagttagacaggaggaaaatagtaaaaaaggtgctcgtactccatatcaatatttaaattctagtgacgcagttatttcatataatcagtttaaacaacatgtactgaatctaagtaagtcaaaagatagaatgtctaagaagaaacgagattatctactcgaagagagagatattaataaattcgaagttcaaaaagagtttataaaccgaaatttagtggatacccgttatactacgcgagaattagcgaatttcttaaaaacttattttaaaataaataacattgatactaaagttaagacaatcaacggtggtttcactaattatttacgtaaggtgtggagatttagtaaagaaagaaatcatgggtataaacatcacgctgaagatgcattagtcatagcaaatgcgaacttcttatttaaacaacataaagcactcaaggaagctgaaaaagtgttaaacaatccagcaagtaaagatgaaagtgctatagatgtatttaatgataatcagtataaagaattaatggctaaaaatagcgtcgtagatgaaattaaagactttaaagatttcaaattctcacatcgagtggacaagaaaccgaaccgtcaattattaaatgataccctctattctacacggaatattgataatcatgattatatagttcagaagttaactaacatttatgataaagataataaagaagttaagaaaatcgtaagcgaaaagccagaaaagttactaatgtatcaacatgatccgaaaacttttaaaaagttacagacagttatggatcaatatgctgaagaaaagaatccattagctaaatattacgaagaacatggtgaatacttgaagaagtacgctaaaaaaggtaatggaccagcaattaagagcctgaagtatatcggtaaaaaagtgaatgcgcattttgatgttacagataagtatccaaatcctaaaaataaattagttaaactttcattgaaatcatttaggttcgatatttataagggagaatctggatataagatgttaggcttatcctatttagatgtagaaaagaaagacgcgtattatcgcataccatctgagtattacgaagagcttaagaaaaagaaaaaaataaatgaaggcgacgaatttattggtagtttctatacaaatgatttaataaaggttaatggcgaaaagtatagagtgattggtgttaataatagtgatagaaatattattgaagtagatatgccagatattcgatacagagagtacttagaactaaataataaaaaaggtacaccacgcatttttattactataggtaaaaagattaatactatcgaaaagtattccacagatatcctaggtaatttatataaaaatgaacgccctaaaaaaccacaactaatcttcaaaaagggtgtagagtaa

SEQ ID NO: 122 - DNA, 3192 bp, unidentified
  misc_feature 1..3192: note = Synthetic sequence or unknown origin
  source 1..3192: mol_type = other DNA
atggcaagtggggaaaagtcgcaattgggaattcatctggacgtgggacacgattcgatcggctggtgcgtgacgcgcacgatgccgggcgatgagaagttcctcgccattccaggcacaggcgtggtgttgttccccgccgacgattgccttgccaaccagcgcagggcatttcggcggcagcgtcgtcatatccgcgccacgcgccagcgcatcgagcggatgaagtccgtcttgctcgacatgggtgtaatgacggaaggtgaactcaagcgcaatctgaccgccgcgccgtggaagctcgccgcacaggtactgacgacgggcaagacgctttcgtggccggaactgtgggcagtgctcaggtggtatgcccataatcgcggttatgacggaaacgtgctcgcgtctttgcgtagcggtcgcatggtgagtgccgaggacatagagaaaaacgccgcagctcgagaactgatggcgaagtatggcacggcttcaatggctgagacgatgtgccactacatgaaaattgagccggatggcaagattatcgcctcgcgcgaacgcttcaagggactcggcgtctcgtttgaccgttcttgcgtcgagaaagaggtgcggcagatcttgttggtacataagggtgttttgaagggcgtggacgatgcctttgtccatttgctgatggcgagccctgtgaccgagccacattatctgcgcacggtcgaaaagctgccgttccatgtcccgaaccgctattggggtggcgtgctgttcgggcagcttgcgccccgctttgacaaccgcctcatcggggcgtgtccagtcacgggagagaagctgccgggcaaggcaacgagcgagtttctgcgttttcgatttgcgatgatgcttgcgcatgtgcgcgtcgggtcggattcgcgtccgcttacagccgacgaacgtgggcgcatctataaggcggcaacgatgtgcgggggcttccaaaagggatcgttcaagaagatcgtagacgaggtgacgggcgaggacgtgacgaacatcgacgccttgttgaccgctcctgaagccgacaagtcgctcgtcctttatccgggattgttttcgttgacgaagaaggggctcgatgcgtttattgaatcgcaagccctccgaacgttggcaaacaagctttttcgaggcaagcgcatgacggttggcgatgtgattgcacagattcctgccgacaagcaagaagatgccaaagcggcattggcgaagaacacgagaaagggaaagaaagcgttcgatccgttgtccgatgcaatcgttgctgaattgccgagtggacgtgcgccgtatgcgcggagcgtgcttgtcaaggcggcggaagcggttctgcgcggagaagacccgacggaaaaaggcggcatcctctatcgcgatgcgacaaaggaagacgtgctgaaggaggaggacatcgatcgcgagacgaacaaccacctcgtccgccatcgcgtgaagatccttttgcggctcttgcgcgacatcgtgcatgactatgccgaaaacaatcccgcgcaagtcgcacaggtgacgattgagatggcgagagatctgaaggagctctctggcatgacaaacaagcagatcgtcagcgagatgtacctcaaaacggcgcaccaccgcaatgccgcaaagaagcttgccgaactgcttcattgcgacgcggcagctgtttcagcgggattagtccgcaagatgcgcattgcagaagaccttgatttcaaatgtccctatacgggttggaagtttgatccgatggacgtagtgcacaagaacgtcgaccttgaccatatcctgccgcgcagccagcgtgcgacggattcgcttgattcaatggttctgacgtttaccgaggtcaatcgcatgaagggtgcgagaacaggacttgagttcgtgcgcgagttcggcgggcagcgcgtcaacggacgcgacaatctcgaggtctttgacgagaaacgctatcgggactttgtagataagctgcgtatcgaccgctatcccgacgacaagaagcggcagaaacgtcgtcaggagaagctgctcaaacttcattccgaagatgtgggcatgacggaaggcatgctgacgcgcacgtcgtacatcacgacgctggcgacaaaggccattcgcgggttctttgccaactgtgggcgtatgccgcgcattatttccgtgccggggcgtgtgacggcggaattgcgcaagcaatgggacattcttgggttgctggcagagagcgatcctcgtgttgtggatgaaaacggtcggcttcggctcaagcaggagatacgcgggattacgcacatgcaccatgccgtcgacgcgattacgctgggattggcggcaacacttttgccgacggatggtacattctgggctatgatgtgcaagcggcgtgtgaaggaagaggaaaagcgattgttggcttcaacgggtgcgttccagttcacggcacagaacgagccacggcttattgagttgccgccctatctgcgtcaagcaatcagcggggcattggccgagcagcgcgtcgtcgtacatcagccgcaggagcgggcggggcttaaggttcagcagaacacgtggggcattgagaagattgagaacggcatggtctacattcgccagcgttcacgtgacgagaagacgggtaagattgctgtcaagcacgacagcgtgacaatagacaaggcgtttggcataaaacccaccaatggcaacgggaagctgcaagctatcaagggcgtattgttgccggatgtaaacttcggtgttgccttgctgaaggatccgaagttcgtccgtcatcagcgcgtttggaacgagctcgccattgtaaaggatgaaaacgagggtcggctgccctgtcttgtgagacgtggtggcctgattcgcgtcgcaacgggaaacttttccggcgtgtggcgtgtagcatccgttaaggacaacacgtcgggcattgcattggatatagtgcgacctaatgccgtaaaggttcagaacggcgttgattatgcaaaaatcaatgtaaagctatcttcgcttgtcaaagctgggcttgatgttgtcaagcaaacctacacgggagtcgccttgtgtcctatcacatcattgacatctcgacaaacggggtcgcgctctcagtaa

SEQ ID NO: 123 - DNA, 3198 bp, unidentified
  misc_feature 1..3198: note = Synthetic sequence or unknown origin
  source 1..3198: mol_type = other DNA
atggaaaaacggattttcggtttcgatataggaattgcgtcgctgggatgggccgttgttgattttgacgacacggcagaccccgaaaacaacatttatcctacgggaaaaattgtcaagtcgggggtgcgctgtttccccgttgcggaaaatccaaaggacggcaaatcattagcgtttcccagacgtcaaaaacggttgcagcgcaaattgtgccgccgcaaagccagacgcatggcgggcataaaggctttgtttgtcgcaaacggtttgattgacagggcttctttatttgatgaaaaagagaatatctataaagcgcgcgacaaagccgacgtttgggatttgcgcgtcaaagctttgaccgaaaaattgactacggttgaatttatccgtgttttgacgcatttggcaaaacaccgcggctttaaatcctaccgtatcgtgcaggaaaaggcggacaaggaaaacggcaaggttttggcagcggtcaaagcaaacagagctttgctggaaaacagcaaaactctggcgcaaatcattgtcgaaaagggcggtccaaaacgaaacagagatgatagagaaggcaactcgacttatgaaaattcgatcccccgcgacgaaatcgaacgggaagcaaaactgatttttgaaaaacaacgcgaattgggcttgactgcggcgaccgaaaaattgcagcgggattttgtgggaatcgcttttcgtttccgtgaaatcaacggcaaaaaaatcgaaaaaatgataggaaaatgcctgtttgaaaaagacgaaccccgtgcgccgaaaaacgccccctccgccgagtttttcgtggcatggacgaaaatcaacaactgccatgttcgggacaatgacggcaaattacgctttttgacgcaagaggaaaaagacgccgtttttgaactgctgaaaaacaaaaaagaagtcaagtatgcagatatccacaaaaagctttttccgaatcgtccggatattcggtttgcggatgtggaatacaatccgaagcccgtttttgacaagaaaacaggtgaaatcaaagaaccgtccgaacccgaaagcttgaaattttttgcgctgaaaggatggcacgatttaaaaagcgcgattgacgtttccgcttatccgaatgaatggctggacaaagcggtcaccgtgattgccacgcaaaaaaacgatgccaatatttcaaaggagctgaaaaatctgggtttttccgcttcggatgctgaaaatctggctggattgtccttttcaaaattcataagtctgtcgctaaaggcgttatacaaaattctgcccgaaatgcaggcgggcaaaaagtacaacgaagcctgtgaagccgtcggatacgactttaaatcgacgggtgaatcttttgccgtgcaaaagggaaaattcctgccgccgattcccgaatctttggcaacgaccgttcctgtcgtcaaccgagcaatggctcaattccgaaaagtgtacaatgccttggtgcgcgaatacggcacgcccgatcaaatcaatgtcgaactggcgcgcgatgtttataacaaccatgacgaacgccgggaaattgccgcaaagcaaaacgaatatgcagaagaaaagaaaaaggtcaaagcatcggcgtgcagcaaactggagctggccgatatcagcggacgcgacttgctgaagttccgtttgtatgaacagcaggacggcaagtgtatttattcgggcgaaaagctggatttgcgcagattggtggagcaggattattgcgatgtcgaccatatcattccgtattcccgctctttggacaattcgcagaacaacaaagttttatgcttgtcgcgcgaaaatcggcaaaaatcggataaaacaccgttggaatacattacagatcccgtaaaacaggcggaatttatcgcccgcgtcaaatccatgaaaggattgggctctaaaaaacgggacagactgctgattcgcgactttaacgaaaaggatgtcgatttcagagaacgcaatatcaacgacacgcggtatatggcgcgttacattatgaaatatctggacgactgcatagatttttcgcaaagcaagacggatgtcaaagaccgcgtccaagcccgaaacggagcattgacggatttcttgcgtcatcaatggggattgaaaaaagaccgttccgaaagcgacaaacatcacgcgcaggatgcgatagtcatcgcttgcgcgaccaacggatatacgcagtatctggctcatctgtcgaaaatttttgaaaacaagcaagcttacgccaacaaatacggcgaaccgtggtacaaggcgttcaaacaacatgtcaaacagccgtgggacggattttatcaagacgttcaagcatcgctggcggaaatttttgtttcccgcccgccgcgcaaaaacgcaacgggggaaattcatcaagataccgttcatacactcaacccgaaaaagaaaaacaggtggggtgaacttgtatacagcgcaaaggacgttaaatctggattaaatgttcgcggtggaatggcgggcaatagcaatatgttccgttgcgatgtttttgaaaaaggcggacgattttttatcgttccggtgtatttggctgatttctgtgaaaaaaacagatcagattgtttctgtccgaaagataaagagcatgaaaaacccgatgaaacatataagtttttgtttagtgtgtttaaagatgattatctttctatagaaacgaataaaggagaaaaattttatggttatatgaaccaatatataacctctacgggacaattttatataggttcaaatgattcatcgccaatgtactcaatatcaacatcttcatttgaaaaacaggatattttattgtatcgcattggcgaaaaatttgaaaaatgttctgttgttgactttgattcggaaaaacaagaaatgaaagtagcttctttagaagacggctctattcacaaaatcaaagcttctgcaaaagtaaataagaaaggagagactcaaaaaatttataaaacagataagccctatgaaaaattagataaaggaaaaacaatcagctcagctacttttaagagaatacgaaaataccaagttgatcctttgggacggtatgtcgaggtcaaatccgagatcagactaccgctgaacatcaaaaaaggaaaatcgtaa

SEQ ID NO: 124 - DNA, 3219 bp, unidentified
  misc_feature 1..3219: note = Synthetic sequence or unknown origin
  source 1..3219: mol_type = other DNA
atgtatagattaggtcttgatataggtacaacttcagtcggttgggctgtactgaatacaaataatgatgcggaacctaatagaattatagatttaggtgtgcgaatttttgatgcggcagaaaatccaaaggacggttcttctcttgctgcgccacgcagagatgcaagaggtgcaagacgcagaaacagacgccatagacatagaatggaaagaataaaggcgctgttggttaattcttctgtgctcacaaaagaagaactgaaagatttgtataataaaaaagaacttatagacatttatcaggtgcgttacgaggctctcgacagggcgcttacaaacgaagaatttgcaagacttctcatacatattgcacagcgtcgtggttttaaatcaaacagaaaaaatgaagataaaaagagcgacagcggtaaattggtgacagctacaactgaaaacaccgaatatatggcgtcaaagggctatcgtactgttggcgaaatgctgtatcttgacgaaaagtttgcacataataagcgtaacaaaggcggggactacagcaatacattcctgcgcagtcagcttactgaagaagttgtgattatttttaaccagcagaagttgtttggtaataggtttgcagacgatgttcttttaacaaaatataccgaaattttgttaagtcagagggattttgaccagggaccaaatgaaccaagcccatacgcaggtaaccagatcgaaaagatggtgggtgaatgtacatttgagaagggtgaaaaaagagcgtcgaaagcaacatattcttttgaatatttcaatcttcttcaaaaaataaatgctatcagaattcagtcaccggaaggcaaaagaacactgactgcagatgagcgtaatagaatagtagaactgtgtcataagactgaaaaagtagagtatcgtcacctgagaaatgcgatacctctggaatcttatgaacagtttgctaacttatcatatggagataaaactactgaagaagtcgaaaaaacaaagttccagtacctgaatgcttatcatgatatgcgaaaggtttttgataagttatcaaaaggacatatttcaaacatatctgttaaacaaagagatgctattgctacagctttgacttattataaaacagatgaaaaaattatttctgcacttgcagatattgaactttctcaggaagagttaaatgttgttcttgaactcaaaaattattccaaattcggcaatttatctgtcaaagcattaaataaaataattccatatctggaacagggttacacatacgataaagcgtgtggcttagtaggttatgatttccgtggtcatacagattcatacaaaagtaaatatctgcctaagcttccagatgatatttacgatatcacaagtcctgtagtaaaacgcgccgtaaaccaaactattaaagtggttaatgaaattattcgcagatatggttcccctgctgcagtaaatattgagctcgcccgtgaaatgtcccgttctttcaatgatagaaaggaaatcgaaaaagcacagaaagaaaatgctgataacaaccagaaaatccgtgaagagataaaggatacctttaaaattctttctccaactggacaagatattattaagtatcgtttgtggaaagaacagcaggaaacctgtttatatacaaatagtcctattaaagcagaacttcttttttcaccgggatactgcgaaatagaccatataattccatacagcatatcttttgatgattcttacagtaacaaagttcttgttatggcatatgccaacagagaaaaaggaaacagattgcctctgcagtatgtgaaaagtaaagatgattttattggtttggtaaatgcgtttatcaaaaacaaggctaaaaaacagaaactgctgaaagaatatatttctgtggaagatgaaaatcagattaaacagcgaagcttgcaggacacacagtttattacaagatttatgctgaattatatccgtgataatcttgaatttgactctgcatacagtggcaaagtgaaggtgcaggccgtaaatggtgctgttactgcatatatgagaaaacgctggggaatttccaaatttagagaagatacagataaacatcattgcattgatgctgtagtggttgcctgtatcactcctggcattatacagaaagtaaccagatactcaaagcgcaaagaaaattattataacgaccgtgatattgagcttaataacgaaagattccctcttccttggcatgaatttaaagacgagatagatgcacgcactattgcaaatcctgccgcattattggctgaaataaatctgccaaactatatgggtgtggatattgaaaaaatcagacctatatttgtatcaaggatgaccaaaaagaaaacatctggtcaggctcataaagaaactattcgtgcatggcgagatgtaactattgatggtagaacagaaaagaaaactgtgacaaagacagcgcttcagaatttaaaattggataagaataatgaaattgtcaattattacaatccatcaagtgacagattattgtatgaactgctccgtgacaaacttatcgccgctggtggcaacggtaaaaaagcattccctgatggttatattttaaaaccagcacctaaaggcggtgttcagtcaaaagttcaaaaggtgaaaatctacgatacttccagcctcaatgtttctgtaaacgacggcgtagctgccaatggtgatatggtacgcattgacctttataaagttgagggtgacggatactattttgttccaatatatgtggctgatctgataaaagaaaaactgccaaataaagcatctgttgcagctaaatcatacgctgaatggaaggaaatgaaagatgaagacttcttgtggtctgtttatccgaatgaccttttgtatattgagcataaaaaagaaatgaagtttacaaaagtcttcaaggatgcccgtattaataacgaaatgtttgcaaataaagtattcgtttattacaattcagcggatatttctacaggctctataaaaattatcacagatgataatggatatatgataagaggtcttggtataaaaacaatttcaaatatccagaagtatcatgttgatgtattgggtaataaatacaaggcagaaaaagaaagccgaaaataa

SEQ ID NO: 125 - DNA, 3222 bp, unidentified
  misc_feature 1..3222: note = Synthetic sequence or unknown origin
  source 1..3222: mol_type = other DNA
atgagatatacaattggtttagatataggaatagcatctgttggatgggcggtaattaataatgatgaaaacagaatagaaaatttgggtgtaagaattttcaaaaaggcagaagatcctaaaacggggaaatctccaaattttgatagaagattagccagaggaagtagaagaagattaagacgtagagcaataagaatgcaaaagataaaagatttatttttaaaatacggtttagtcaattcagaagaattaaagaatttatatacaattaatgaaagcacaattgatgtatgggaattaagagaaatagctttagacaataaaatagatagaaaaagttgggcaagaattttaacgcatatagctaaaagaagaggatataaatcaaacagaaaaatagatatagaagataaagaagttggaaaattaagcaaaggtacaattgaaaacaaaaaattacttgaagaaaataattatagaacaattggtgaaatgttttataaagatgaaaaatttaaaacaaataaaagaaataaaagtggagagtatacaaatacagttttaagaagcatgttggttgatgaagttaaaattttatttgcaaaacagagagagtatggtagtcaatatgctaaggaggaatttgaaaaagaatatatagatgaaatgtgttttcaagaaaaatatttaacagaagaattattagaaaagatgttaggaaaatgtacgtttgaagaaggagaagttcgagcacctaaaaatagttacacatttgaacgatttatgttattacaaaaagtgaataatttaagaattgatatgctgggcgaggagattaaattaacagaagaacaaagaatgaaaattattgagatggcatataaacaatccgaagtaaaatatatacaaataagaaaattaatgcaactaccagaaaaagcaaaattttcagatttaaattattacattagaaataataaaacagatcaaaaaaacgaagagttatcagaaagtgattttaacaaaaaaatagaagataaaaaatttgtaaaattggatggttggcatagtataagaacagctttaaataaaattgataaggcggaaaagtttaagttattagaagctaatcatgatttacaaaatattatagcagatgctttggttagaaataaaacagatgaagacattcaaaaatatttaatagatagaaatatagatttagatttaattaatgctgcaaaacaaattagtttttcgaaatttggacatctttcatataaagctatgaaaaatattattcctgaattagaaaaaggcttgacttatgataaggcatgtgaagaagcaggatatgattataaaggagaagaaaagacaaaacagtataaattacctgcactttcagaattagatgaggttattttaaatccagtagtgttaagagctgtaacgcaaacaagaaaaataataaatgcaattatagataaatatggttctccaatgattataaatattgaaacggctaaagaattgtctaaatcatttgatgaaagaaataaaataaggaaggaacaagaggaaaataattcaaaaaatgaagaaataaagaaaaatattaagaatgaatttaatattgatgcaaaacctcaagatattgtaaaagttaaattgtggagagaacagcaagggctatgtgcttattcacaaagaagaatagagtttgataaattatttgacgataattatgttcaaatagatcatgctattccattttctaaatgttttgatgattcatataataataaggtattagttttaactgatgaaaatcaaaataaaagagaaagaactccatatgaatattttggagaagatatagaacattggcataaattcgaggaatttgtaaatttaatgtataaaaataattcaaagaaaaaacaaaaattacttataaaaaacttttcagaggataaatcaagggaatggatttcaagaaacattaatgatacaagatatattgctaaatttatgcagaattatataagagaaaacttactatttgcagaaagtgaaaataaaaagaaggtatttaatataaatggttcagctactgcggtattaagaagattttggggactttctaaaaacagagaagaatcagataagcatcatgcacaagatgcagttgtaattgcatgtgcaacaccaggaaatattcaaagagtttcaaattatagtagaagaaaaatattgcataaagatagcattatagataaagaaacaggagaaataattgatttaactattaaagaaccatggccaaattttagaaaagaagtggaagcaagaatggaagatgcagacaataatggtgaattatatctattaaaacatggaattttctataattataatgatattgatataaacacaataaagcctatctttatatctagaatgccagaacataaagtaactggtgctgcacataaagattcggtaaaatctttaaagtataaggagaaaaattttacaacaataaagaaaccaataattagtgtttcaagtgcagaaattaggactatagttgaagatgagagatgcagagatttatatattagtgataggataatgtatgactatttttatcagaggcttgtaatagaaaagcaaaaggcaagtgttgtatttaaagaaggatatagaaagaatagtaataatgggattggcccaattgtgagaagtataaaagtgccatctttaggaatatcaggtgtagaattgaaaaataaaggaatagcggataatgataatatggtaagaatagatatatttgaaaaagatttaaagttttatatggttccaatatatgtatctgattttacgaagcaagaactacctaataaagcagtagtagcatacaaagatgaaagcgaatggaaagagatggatagtacatatagttttaaatttagtttgtatccaaatgatttagtgaaaataaagaaaaagggtaaaaaggaagaatttttatattacaattcagctaatagaagaattgcatcaattacattaattactcctaatgagggacataaagttgaaaatatagggattcaaggattagagatttttgaaaaatataatgttgatattttaggaaatatatcaaaaattaaaaatgaaaaaagggaaggagttaaaaagttataa

SEQ ID NO: 126 - DNA, 3228 bp, unidentified
  misc_feature 1..3228: note = Synthetic sequence or unknown origin
  source 1..3228: mol_type = other DNA
atgacccaaaaaaaggaggtcaaaaaaatgagtaaaacagatagtattagctcatatacattaggtattgatttaggttcaaactctattggttgggctatcgttaagttggatgaaaatgacaatccttgtgggattgaaaaggtgggtgtgcgtgtatttgaagcgggcatgaaaggacagtatgaagagggcaaggaagagtcccgaaacaaaaaacgaagagaagcaaggttggttcgccgacaaatagagcgccgtgcaagaagataccgtaagttagccaatttactacaacaaataaaactccttcctcaaggagatcttaacgatagtggggaaagacagaggatattagacgaattggataaagtattacgaacgaaatatattaataaccatctttctcccgaagaaaaaaatcgattacatcaaatatttatttattatttgcgttccttatctgttgaacaaaaattagagccgaatgccttaggtcgtgtcttatatcatttgggtcagaggcgtggatttttaagcaatcgccgaggccagaaaaaggacaatgaagaacaaggtaaagtaaaaaaggggattgcagagattcgagtcgaaatgagtcgattagggactgagactttaggaaaatattttgctcaaattgacactatggatatcaatcagaagaggatacggggcagatgggttgcccgcgatatgtatgaacaagagttttacactatttgggattttcagtctcaattttatccagagttactaacagaggagaagaaaaaacaagtattctttgcaatatttttccaaagacccttaaaatctcaaaaagacaagattggtttttgtcagtttgaatgcatagcgcggggtaaaaagagaaatagacgacgggctccgtgggtcattctcaaagcccaacgatttagactcctacaaaaagtaaatgatttattaattgtagccgataaaaatacaaaaaatcccttgacagatgatgagagaaaattggtgattgaacatctggaaaaaaatggagatactacttttacacagttaagaagcttgttgagattacccgaagaagttaaatttaatttagaagtagccggtgaagaaaaaatccccgggaatagaacagccagtgaaattaggaaagttatcggcgaacactgggacggaatgaattcagaggagaaagataagttagtggaagatatttactccatagtcagcgatagagccttaaagaaacggttaatgagacactggaaattcacagaagaagaagcacaaaaattatcagaaatacccattgaggatggttattgtaatctttcccgtcaagcaattgataagtttctacccggcttacaacaagggagaagatacggcgaactggtaaaagaaatatacggtatggatgcaattcgagagggatttaaagtggacttgttgcctccaattgaagaggcgccgattggcgaaattcgcaatcctacggtacaaaaaaccctctcagaaatgcggaagattgtgaatgagattgtgaaactctacgggaaaccgcgttatatccgcattgaaacgggaaaagatttaagaaatacaaagaaggagcgagagaggttatggaaaaatagtcgtgacatggaaaaggagcgcaagaaaatcaaagataatttgatgaaaaatggtattgccaatcccacccgtgatgacattgagcggtatatgttggctaaagaatgtaggtggatttgtccttatacaggtcgttcaattaaatttaagtcgttatttgaagagtcccaatatgacattgagcatattattccgctcagccgttgccttgatgattcttttaagaataagacactttgttatcacgaagaaaatcggaaccgaaaacataataaaacaccctatgaaacgtactcacaagacgagacccgttggaatgaaatcctggagcgagtaagcaaattcaattcggcgcatgcaaaagaaaaattaaagagatttaatttacatggaaagacactggaagaatttatagataagttttccagttcccaattaaacgacacaagatacgcagcaagagaagcagttattttttgtggcttgctttatggtagtgaatatcgaaagcatgtttttgctgtggcaggacctaccacagcagtaatacggagaatgtggaagttaaataagttattaggtagccctgaaaaaaaccgcgaagaccatagacaacatgctatagatgctattgtcattgcaatcacttctcccgctatgattaagaatatttctgagcaggcagaaaaaattccgaaatcagaacggaaacacgacaggtggtggcgattcatccaaccaccgtgggatacattgtataatgaagcaaaagaaaaaatattaagtatcatagtttctcacaaacccgagcgcaaagtgagcggtagattgcatgaagagacgaactacagtccgccgaaacagggagataacaaagatgaaacagtcgtccatgtgaggaaagcaattgccagtttgtcaaaaggagaagtagaagaaattgtggaccctgtagttcgagaaacggtcaagaagaagttggaggagttaggaaaagagaatccgaaaaaagcatttacagacctgaagaattatcccctaatgccaaatagaaaaggtctccaaattcctatcaaatctgtccgcatcaggaaaaaattaagtgtattccctgtaggcagtaagcatagagtgaggtatgtagcaacggacgaaaatcatcatatcgaaatatttgagactaaggataaaaaaggaagaattatttgggatgcaaatgtcgtcagtatgttcgaagccatgcaaagaaaaagaagaggcgaggaaattattcaacggaagttaatccgtgacgggaaagtagttgaagatgctaaattcctctttagtctctgtaaaggtgatatggtatatatgaaagatagtgaaggtgaatatcaatattataagttggttatagtttctgagtatgcttctggtgcaaaggttatgtttttcttacctcatcatgtggcaaaaataccaaaatcatgggttggtttaacaaaaacttccagtgctttacagaaatctgaagcaaagaagtgttctataaatgtattaggagaaacacatatagcccatgattga

SEQ ID NO: 127 - DNA, 3231 bp, unidentified
  misc_feature 1..3231: note = Synthetic sequence or unknown origin
  source 1..3231: mol_type = other DNA
gtgaatatgtcttacggaatcggactcgacatcggcgtggcttctgttggttgggctgttgtagaactggatgaaaatgctgaaccgttcgggcttattagggcaaatgcgcggattttccagggcgcagaacatccgaaaacagggaatagcttggcggcgccgagacgagaagcgagaagtatacgtcgggtcgtcagaagaagagctttaaggaaacacgatttctatgctcttttagaaaaggaaggaatcgccaagaaagaagaaatggataagatgttttccgctggaaatctggaagacatctataaactccgtgctcgtgcattggatgagacagtatcgaaaaaggagtttgctcgaatccttctccatcttatgcagcggcgtgggtttaaaagtaatcggaaagcagataaaaacagcgaagacgggaagctgttgagcgcgatctccgaaaacgaaaaacggatgaaagagaacggttaccggactgtaggggaaatgctcttcaaagacgaaatcttcggaaaacataaacgaaatcgaacaaacgattatgtggcaacagtaagccgggatgaaattaaacatgaggcagaaactgtttttgaaatgcagcgccagttcgggcaagattgggcatctaaaacattcgaaacgaaatatcttgcgattttgcttcgacagagatcctatgatcaaggacctggcggggatagtccgtataaaggtggatggaaagatgaaatagggaagtgcgcactgatccctggagaggatcgtgcattcaaaaacacctatacatttgaaagatctacgttgctgcagaaaatcaatcatctgcgtgtctgggaaaacggatatacacgcgggttgaccgatcaagaaagaaagtctcttattgatctggcatatcgtatcgaaactgtcagttattcaaggatccgcaaagaactcggttgggccgatgacattaaattcagcgacatccagtacgattatcgagataaagagaaaaacaaaaaagaagaagataagagaaagctccctgttatgcgcggatatcatagtctgcgcaaagtgttgaacatttcaaatactgacgcaaatttcgataaacatctgttggatgatattgtcacggtccttgcactgcataaggataccgaggcaagaaaaaaagaactcgaaaaattacctcttacaaaggaacaaatcgataagttgctggaactggatttcagtaaaacgggaaacctttctatcaaggcatgtgaacggatcgaaccgtatctgttagagggattgacttatgacaaagcctgtgaaaaagccgggtttgatttccacggacatacagcaggcggaaaaggatcgacgctacccgcaaatgccgaggaactgaaaaacatcaataacccggttgtgcgacgttcgatttcacagacgatcaaggtggtaaacgcaatcatccgggacatgggttgttctcctatgtggatccacatcgaagttgccagagaactgaaacattcgtttgatgaacggaaaaaggcaacggccgcaatgcaggagaaccaaaaagaaaacgaaaaactcatgaaagagattaaggaaacctttggtatactcaatcctaaaggcttggatctcgtaaaataccgtctgtggaaagaacaacaagaacgctgcatgtattctggcaagccaatcgaacgaagccggttatttgaaccgggatatgcagaagtagaccatatcgttccgtttagtatcagttttgatgattcccggaataacaaagtcttggttctaacatccgagaaccaaaacaaagggaatcgcctgccactggaatacatgacaggagaacagcggaaggctttcatcgttcgagtcaaggctcaagtgaaaaatggaaagaaaaaacaaaatctattgcgtgaaaaggtaacggattatgagcgcgataattttagagaacggaatctgaaagatacacagtatattgcaaaatttcttttcaacttcattcaagatcatttaatatttgcacaacttccaaaagggaaaaaacaacatgtggtagcagtggcaggaggaatcacggcaacccttcgtagccgctggggattagttaaactgcgcgaaaacggagatgtccatcatgcggtagatgctattgtgattgcatgcactactcaaaaaatgatcaaagatatctctgactattatgccagaaaagaggcctgccataatgctcctttgcgtttcccggaaccgtggccgaattttcgaaaagatatagatcaacggcttactcaatcttctttttctaaagaagatttgatgaaatgcaatccggttttttacagccaagttgatatttctcgaattcaacctgtctttgtttctcgtatgccgcagcacaaagtaacgggggctgcccacaaagagactatcaaaagtcctaaagcgctggaggatggtttgctggtaacaaagcagccgttgaccgccctgaaattggacaaaaagaccggtgagatcgaactgtattatcaaccgtccagcgacaagctgctgtatgaggcattacgtgcccgcctgcaagccttcgatggcgacggcaagaaagcctttgcagggccggagcctttccataaacctaaagcggacgggactcctggaccgatcgtgcggaaggtgaagttgtacgaaaaagccagcctgagcgtgccaatacacggcgggcgtggcgcagctaacaacgacagtatggtgcgcaccgacgtgttttttgtaccgggtgaggggtattacctggtgccggtctatgtgtcggataccatcaagaaaaagctgcccgaccgggcagtggtcgctcacaagagctacagcgaatggaaagtgatgaaagaggaggatttcctgttctcgctgtacgcaaacgacctgatcgaagtagaacacaagaaagccattgtgttcacggtttcccataaaggcagtacgctggcgccaaaatgggagacaaaacggactttgtgctattatgaaggtatgaatatttcaacaggtgccataaccatttccacgccggataatgcgtatactttaccaggcctcggcgtcaagactcttgctactctgaaaaaatttgaggtggatgtactgggcaacgtgcgagaagtcagcaaagagacccggcagcaattccggtaa

SEQ ID NO: 128 - DNA, 3237 bp, unidentified
  misc_feature 1..3237: note = Synthetic sequence or unknown origin
  source 1..3237: mol_type = other DNA
atgcaatggccttatggagtcggactggatattggtgttgcttcgattggatgggccactgttgccctggatgaaaaagcgcagccctgtggcttgattcgtctggggagccgtgtgttcaagcgcgcagagcagccgaagacaggagaaagtctggctgcaccaagacgggaggcccgcggcatgcgtcggcgtttgcgccgcagagctttgcgcaaacaggatttctatcagcttctggagaaaaatcatctgccggacaaggaagaactctcccggctgtttgcggcaggtggtttggaggatatttacgcgctgcgcaccagggccttggacgaggcggtgacaccgcaggaatttgcgcgcattctgctgcatctgatgcagcggcgtggattcaaaagcaaccgtctggcaggcaagtcgaaaaaagacggagtgcttctccaggcggtaacacaaaatcaactgcgcatgcaggaaaatggctataggactgttggcgagatgctgtataaagacccgctttttgcagcctgcaagcgcaacaagggggaaaattatctttccacagtcagtcgggaagaaattgccaatgaagcgcagctgctctttgaggcgcagcgcgaaaaaggccgggactgggcaacgccggaactggaagcggagtacctgtccattcttttgcgtcagcgctcctttgatcagggccccggcgggaacagcccatacaagggcggctgggcggaacgggttggcccttgtactttgctgccggaagaaaaacgtgcgttcaaaaacacatacagctttgagcgttttactttactgcaaaaaatcaataatatccggatcgtggaatccggtcagacccaggcactttcggatgaagaacgtcagaaagtaatggacctggcgtatcgtgtggagactgtgccgtataccctgattcgcaaagaactgcaatggccgcagacaatccggtttgccgatgtgcggtatgatgtggatgccgcaccggaagcagcagaaaaaaagtgcaaactcccgcccatgaaaggatatcatgcactgcgcaaggctctgggcacgcggcaggcagagcttcccttgtgggatgatgtgattaccattctggcatctcaccgggatgaaggcgtccggaaaaaactgctggaagaaaaaggtctgaccgcagaacaggtggaagctgttctcggcctggaattttccggtgtggggcatatttccctgaaggcttgtcagatgctggagccgtggctgctgcaggggctgaagtatgatcaggcatgcagcaaggccggattggattttcgcggtcatagcaatatcaaaaaaacgcctaagctgccggcttcagctccggagctgaaagacatcaccagcccggtggtgcgccgtgcggtgtcgcagaccatcaaactggtcaatgccatcatccgcgaaatggagcagccgcctgtgtggattcatattgaactggcccgggaactgagccgtacgtttgaggagcggcgcagggaccagaaatccatggaagacaacgccagacagaatgaatgcctgatgcaggagatccgggataccttccacaaactgaaccctacgggacaggatttgatcaagtaccgtctgtggaaagagcaggatgggatctgtgcttattctcagcaaagcattgcggtggaacggctgtttgaaaccggctatgctgaggtggatcatattgtgccgtacagcatcagttttgatgattcccgcagcaacaaagtgctggtgatggcggcggaaaaccatcagaaggggaatcggctgccgctgcaatatcttcagggagagcggcgcgaaaaatttattgtgtggacgaagtcgcaggtccgcaactatcgcaaacagaaaaatctgctgcgggaaacagtgagcgaagaagaacaaaacggtttcaagcagcgcaatctgcaagacacacagtatatggctcgctttttgctgaattatattcgggatcaccttgcatttgccgatcatccggctgcgggcaaacagcgggtcatggcgctggcaggtgcggttaccagccatcttcgcaaacgttgggggctgacaaaagtacgggcagacggtgaccttcatcacgcactggatgcggcagtcattgcctgtgccaccaagggcatggtacaacagatctccggctattatcaccgcattgaaggtgagtatcagcagtcctctgatgggacctattccgtgcatacccgtacaggcgaagtcttcccggccccgtggccgcatttccgggatgaactgatccagcggctgagccagaaaccacaggaaaatctgatgcagtggaatccggtgttttattccaattttgatgtggaatcgatccggcctgtttttgtgtcgcgtatgccgcagcataaggtgaccggggcggcccacaaggaaaccatcaaaagcccgaaagccctgcaggatggtctcctgatagtcaaacatcctctgacggatttgaaattgaataaaaagaccggcgagatcgaagggtactatcagccgtccagcgacaagctgttgtatgaggcgcttcgcgcccggttgctggaatttggcggggatggcaagaaagccttcacagaaccgttttacaagccaaaatcggacggcacgccggggccgctggtgcgcaaggtcaagctgtgcgaaaaggccagtctgtgtgttccggttcatggcggaaatggtgcggccgataacgacagcatggtgcgcgtggatgtgttctttgtcccgggggacgggtattacatggttcccatttacgtttccgacaccaaaaagaaagaactgcccaacagggctgtggtggcacataaggagttctctgcatggaaggtgatggaggaaaagaacttcctgttctcgctgtatgcggatgacttaattgaggtggctcgtaaaaaagtaatgccatttactatagtcaatagtgggagcactttacccccctcctatgaaacaactcatgagatggtgtattacggagggttagatatttcttctggtaatataaaagttacaatccatgataattcgtactctcttagaggactcggaattaagacgttaaatacccttcaaaaatatgaagtagatatcctaggcaatgtgagagaggtgaaaaaagaaaaacgtcaatcttttcgataa

SEQ ID NO: 129 - DNA, 3243 bp, unidentified
  misc_feature 1..3243: note = Synthetic sequence or unknown origin
  source 1..3243: mol_type = other DNA
atgaagtatggagttgggttggattgcggtatcgcatctgttgggtattgcgtaacggagcttgattttaacgacgagccgagaagaataattcgtttgggctcgcgtatttttgacaaagccgaaaatccgaaagacggaagttcacttgcgcaaccgaggagagagaaaaggggacttcgtcgccgaatcaggcggcatcagcacaggcttgaacgcataagatatatgcttgttcaagaaaacatagtttctcaagcagagcttgacactatgttcaaaggtaaactttccaatatatacgaaatacgcacaagagcacttgacgaacctgtttctaatattgagtttgcaagagttcttattaaccttgctcaaagacgaggctttaaatcaaacagaaaagttgatgaggaaacctcggataaagaaaccggtaagttattgggagcaattgaaaacaataaagaaaatattattcaaaacggctatcgtacagtcggtgaaatgctgtttaaagatgagcggtattcaaaatataagcgtaacaagggcgaggattaccttaacactgtgtcccgtgatatgattgccgatgaaataaaggcgatttttgcttcacaacgcagttttggtatgccgtttgcaaatgaaaatacagaacacgaatatacggatattgttatgtcgcaaagaccgtttgatttgggacccggtgagggcaacgaaaaatcgccgagtccgtatgccggtaatcaaattgaaaaaatggtaggtcgctgtactttctttcctaaagaaaaaagagcggcaaaggcaacatattcatttcaattgttttcacttttgcaagggataaataatattactttagttgacggaaattcaaataaatatccgttgtcggcgcaggagcgcagaatacttaaggaatattgtttcaatacggcaaatgtgacatatgcttcaatcagaaagaaattggggatttcaaccgattacagatttaacaacatatcatatggcgaaaacggaatagaggagtccgaaaaaaagacaaaatttcagcatcttaaaaattatcaccaaatgaaaaagattttgggtgattcgataaatgcattttcacatgatgagcttgatgaaataggcagaatctttacatattacaaaaatgattcaaaaattattgaaaacttgaaggaagcagggatagatgaatcaatgtacccttcattgttaaagctcccttcattcagtaaaatgggtcatataagtgttaaagcgtgtaaaatgcttattccgtttttggatgaaggcaaaacatataatgaggcttgcgagtctgcaggtatagattttaaagcgcacagcatggcaacaaagcaaatgtatttaccgcctaagtccgatgaacttgaagatattgtcaatcctgttgtaaagcgtgccgtgtcacaaacaattaaggttataaattcaataataagagagatgggaaattctcctacatatatcaatatcgagcttgctcgtgacctttccaaatctaaaaaagaaagagatttgattgataaaaaatatcaaacaaacagggcggcaaacgagcaaatcaaaaaagaaattgccgataatttcggttttgaggcaaaaggtcaggatattattaagctcaaactttggcatgagcaggatggtatttgcccatatacacttaaacctattgaatacggcaagctgttcaatgataaaggatatgtcgatatagaccatattgttccgtacagtgcatgttttgatgacagctataacaataagatattgacattttcgcgtgaaaacaggcaaaaaagcaaccgccttccacttgaatatttggatgaaagtcaaaaatcaaaatatcgcgtttgggttaacaataatattaagaattatcgaaaaaaacaaaatttgttaaaagaatgcttgactgaaaatgataaaaaagagtttaaatcaaggaatttgaatgatacaagatatttgagcaaggttctttataactatattaacgataatttgttgtttgatgaattttatgatgacagaaagcgtcatgtcgtttcggtaaacggtgccgttactgcctatatgcgaaaacgctggggtattgacaaagtacgcgaaaacggcgatttgcatcacgctgtagacgccgcagtaatttcttgtgtaacacagggaatgattaatcaaatttcaaagtattcttttgacaaagaaactgaatttgatgttgacactcgcacgggagaagttcttgagcagtttccttttccgtatagggaatttagaaaagaacttgaggcaagaagtgaaatcgaagacgaaaaaaggcttaaaaatgtactgttgtcattgcctaattacagctatgatgatgttgaggttgcaaaaccggcgtttgtttcccgtatgcctcgccataaggtaaccggtgaagctcatgaagctactatccgttcgggcaaggttgagggatatacaatatcaaaaatcccgttaacaaaactcaaactgaaaaacgggggaattgataaatattataaacccgagagcgacacattgctttataatgcattattgcaaagacttgaggagtttaacggaaatgctgaaaaggcttttgccgaggagtttcataagcccaagtcagacggcactccgggaccggttgtaaaaaaggttaaaataattgaaaaatcgtcatcgaatgttaaagcaagaaatgagaataaattgggcgttgcggataacggctcaatggtccgtattgatgtgttttatgttgacggtgaaggatattattttgtgccgatttatgtttccgatacggtaaaaccgaccttgcctaatcgggcttgttctcgtggaaaatcaggttggaaggaaatggatgacaaggattttgtattttcgctctattccaacgatttaatcaggataacagctaaaaaagatatgaaattcagccttgttaataaagacagtactttgccgtcaaataaattttcaaacggggaattggtatattatattacggcagatatatctacagcgagtattactgtagaaactcatgacggagcatatgcatttaaaggctgcggtataaaaacattgacaaatattgagaaatataccgttgacccgctcggcaatgccagcaaggtgaaaaaagaaaaacgaatgtattttaaataa

SEQ ID NO: 130 - DNA, 3246 bp, unidentified
  misc_feature 1..3246: note = Synthetic sequence or unknown origin
  source 1..3246: mol_type = other DNA
atgaagtggccttacggaattggtctggacatcggtgtagcgtctgtaggttgggctgttgtggcactgaacgacgcggcccagccctgcggattcatccgactgggaagccgcatcttcaaacgagcagaacagcccgacaccggtgaaagtttggcagctccacggcgcatggcccgcagcatgcggcgccgtatacgtcgtaaggcgctacgcaagcaggatctttaccggttaatggaacaatgtgatttggccactcaagaagagctctctgctctttttgccgccggtcatctggaagacatctatgccttgcgcacccgcgctttggatgagtctgtcacttcacaggagtttgcacgcatcctgctgcacctgatgcagcgccgcggtttcaaaagcaatcgccggacagctaacagcagcaaggatgatggtctcctcctgcaggctgtcacccaaaatcagcagcgaatggcggaaaacggatatcgcaccgttggtgagatgctgtacaaagattctttgttttgctctcacaaacgcaacaaaggggaagcctatctttccaccgtcagccgggatgagattgcccgggaagcacaaacgctctttgccgtgcagcgcggcttcggtcagccatgggctacaccggaactggaggccgaatatctttccatcctgttgcgtcaacgctccttcgatgaggggcccggcgggaacagtccttatcggggtgggtgggccgacaaaatcggttcctgtactcttttgccggataaacaccgagcttttaaaaacacccctacttttgaacgattcaatttgctgcaaaagatcaatcatattcgtgtggtggaaagcggcctaacccgtcctttatcagaagaagaacgcgctcagctgttggccctggcctatcggattgagacagtgccttataaccgcattcgaaaagaactgcattgggatgaaggcgtgcgctttgccgatgtacgttatgagacaggcgccaagcccgaaacctatgagaaaaaatacaaattgcccattttaaagggtacacatgcgctacgtaaggctctgaaggcggacactccggattttcctttgtgggatgaactggtcacttttctggcactgcaccgggatgaggatgcccgccgcacgatgcttgcagaaaaagggctcacacctgcccagacagaggcactgttggatctggattttgccggaaccgggcacatttctctggaggcttgccggatgctggagccctggttattgcaggggttgacctacgaccaggcttgtacacaggccgggctggatttccgtgctcataataacaccgaaaaggacgtcaagctgcctgcttccgctcaggagctggaagacatcaccagtcccgtggtgcgtcgggccgtatcacagaccatcaaagtggtcaatgccatcatccgtgaaatgggacagcctccggtatggcttcatttagaattggcccgcgagctgagtcgaactctggacgaacgccgaaaggcggaaaagtcgatggagcagaacgcctttgaaaatgagcatctgatgcaggaaatccgggaaactttccatatgctggaacccaccggacaagatctggtaaaataccggctttggaaagaacaggatcaccgctgcgcatattctttacagtacatcgctcccgaacatctgtttgaatccggctatgccgaggtagaccatattgttccttacagcatcagttttgacgacagccgcagcaataaagtattggttctgtctgctgaaaaccgtcaaaaaggcaaccgcctgccgctacaatacctgcaaggagagcgccgcgaaaaattcattgtatggaccaagactcaggtgcgcaattatcgcaagcaaaaaaatctgctgcgggaatctctgagcgaagaagaacagaacggattcaaacagcgcaacttgcaggatacccagtacatggcccgctttttactgaattatatccgagatcatctggcctttgccgatcacccggccgctgggaagcaacgtgtgatggcgttatccggcggcgtaaccagtcatctgcgcaagcgctggggcctcaccaaagtacgtacggacggcgacttgcatcacgccctggatgcagcggtaattgcctgcgccacgcagggaatggtgcgccaggtttccggctattatcatcggatggagggcgcctacttacagcaggccgatggcaacggttccacgcacagtcgtactggtgagcgcttccctgccccgtggccccacttccgggacgagctggttcaacggttgagtccaaacccgcaggataatttgatgcaatgcaatccgatgttttacagccaatttgatgtggattctattcagccagtatttgtgtcccgcatgccgcagcacaaggtaacgggagccgcccataaagaaaccataaagagccccaaagcgctgaatgatggtctgctggtggttaaacagcctttgactgcactgaaactggacaagaaaaccggcgagattgccggatactatcagccttccagcgacaggcttctgtacgaagcgcttcgtgcccgtctgcaggcctatggaggcgatggaaaaaaagccttttccggaccggaacccttccgtaagccgaaagcagacggaacacctggcccgattgtgcgcaaagtgaaactgtgcgaaaagaccagtttaagtgtactggttcatggcggacagggtgtcgcagacaacgacagcatggtgcgcgttgatgtgttttttgtgccgggcgacggatattatctggttcccatctatatatcagatacccgcaagaaagaactgcccaatcgagcggtggtcgctcataaaaattacagcaactggaaagtcatggatgatcgggattttctcttttcgttgtatgcagatgatctgattgaaatagaacacaaaaaggggctgacgttcacggtcgccaataaggacagcaccctgccggctcagtgggaaaccaaacgaactctctgttattacaccggcatgaatatttccagtgggtctgtaacgattgtttcacccgacggtgcctatattttaccaagtcttggcgtcaaaactcttgtctctctgaaaaaatatgaggtagatgctctgggcaacgtacgggaagtacgtaaagaatcccgacaacggttccggtaa

SEQ ID NO: 131 - DNA, 3246 bp, unidentified
  misc_feature 1..3246: note = Synthetic sequence or unknown origin
  source 1..3246: mol_type = other DNA
atgaaaatcataggacttgacataggtattcgctcgataggttgggctttacaagaagatggagaaatcatagctaagggcattcgcataccacgaagtgttgaagacgcccaaacaaaagaatcccttgcagcgcataggggagcagcaaggcgcattcgtagaactttatatcggcgcaaggcaaggttaagtcttttaaaacgcttgatttgtaatgaatttggcttaaatttagctgattatcacgccaaagacggcgacttaccaaaggcttttgttgcagatgaaaacaccaaaagcccttatgaacttcgtgtcaaagcattagaacacaagttgaatgccgatgagtttgcaagagtgattttacacattgccaaacacagaggctatggcaacaaacacgctagaaaagaaagcgataaagacaaaggagcggttttaagtgccttaaaaaacaacgaaaaggctttaacggcttataaaagtgtaggcgaatacctctacaaagagttttaccaaaaagggcgtttcattactaccaaagatgaaaacggcaaagaggttttggagcgtgatgaagcacattttggcaaagttcgcaatacaactgatgtttatgagcaatgtatgagacaagaatggctacaagctgaattagaacttatttttgaaaaacagcgtgaattgggttttaaattcagcgatgaatttaaaaataaggttttagaaatagcgtttttccaacgcccactcaaagacacagacgacaaagtcggcttttgcacattttttcctgatgaaaaaagagctccaaaggatagtttaagtgccatagagtatgtcgcacttggcaaaatcatcaatgagctaaaatatattgagaaaaaatggaaaaaagaaacaggcgaagagttaaaaggtaaaatttgcgctccacaaaatatcaatgatattttaaagattgtcattgaaaaaggcgaaatcagctacaaagaatttcgctcaatccttaaacttgatgaaagagttaaaattttttcaaaaaatgtcaaacttgattacactcaaaaaaccattgatgaagccgaaaaagctaaatttttggagttaaaagcaactaaggacaatctaaacattccaaatttaaaaggttttcaaaatgccttaaaaggaagttttgaaaaatttgacagaaaaacacttgatgatatagcttttgatttagcgacaatcaacgacaaagaaaagctattcaaagaacttgacaaatatgatttaagcgcagagcaaaaagaagccctatcaaatctttctttttcaaaattccttaatctcagctacaaggctttaaatgagattatccctttgatgaaagatggtttgcgctatgatgaagctgtggaaaaactaggctttaaaccaagtgatgagtatgattatgataaagtgcaaaaagaacttcacaatcctgttgtttctcatatccttgccgaagtggttaaggttttaaaggctattttaaaaaaacacgggcaagtgcataaaatcaacatagaatttacccgtgaagcaggtataagcaaagaaaaacgcaataagctagaaaacaaacaaaaatcaaactttcaagctaatgaaaaagctaaggaaatgtgtaatactcttggcattgtggcaagtcataaaaatatacttaaaatcaagctttggaaagaacaaggtggagcttgtgtatatagttgcaataatggtaaaggcaagacaattaccgaaaaggatttgcaagatgaaactacgctccaaattgaccacatttatccgtattcaagaagttttgatgatagttatagcaacaaagtccttgtttttacagaacaaaatcaaataaaaagagaaagaacgccatttgaagcctttggtagcaatacaaacaaatggaataacattgtttcttttgtaaatgggtgtaaaactatgtcagaatctaaaaagaaaaggattcttaacactgaatttaaagaaagggagcagggatttatccaaagaaatttagtggatacaagctatatagctaatgttgtaagggattatattgacaaaaatgttaaattcttgccccttgatgaaaaagaattagcacaaagcactatgttctttgagttagatagctataatgaaaaagacgattcaaagaaagcatacaaacgcaaacacatagaaatcattagtggtaacctaacttctatgatgaagcattattggggacttcattttttagataagaaaaatgaatttggcgaatatgaaaaggatagaaatcatcacttgcaccacgcattagatgctatcatcatttcatatatgaatgcaagtagagtaaaggcttttgctgattttaaaaagaatttagaaacgatgaaagcaagtgaatatgctgaaaagttgagcgaaatagagaaagagcaaaaacgcactaaaagaaagaaaagcacatttgaagtgccgtctaactatgctaaccgcgatgaatttgaaagaaaaatcaaagaacaaatctttggcatttttgtttctcaaccaccaaataaaaaggcaagaggtgctttgcatttggatagcttttactcacaaagtgatacaagtgtcataagcagtaaggatactatggaaaatgcgctcgaactaggcaaagtgcgtaaaattggcacaaaaatcgttagcaatgcaagtatggtgcgtttagacatctttaaacgcaagaaagatgacaaattctttggtgtgccgatttatactatggactttgcaaagggagttttgccaaataaagcagttggctcaaaagaatggatagaaatggattcaaattatgaatttttgtttagcattttttcaaatgatttgctttatgtaaagaaaaagggtatggaaaaggctgagttgtgttattatgtgaaatttgatattggcggtgggcaaatttcgttcaaatcgcacgacaatagattaaaatcgcttacggaaaatcaaatcaaactttatggcacaaaagaccctaccgaagaaagagtgcgaggtagagtgggcattcaaaatttagaaatctttgaaaaatggcaagtctctccgcttggtgaagtcaaaaaggctgaatttaaagagcgtgagcctatcgcattgaaatccactcccaaaaattcaaagctagacaagctaaattcaaaaacggagcgaaaatga

SEQ ID NO: 132 - DNA, 3252 bp, unidentified
  misc_feature 1..3252: note = Synthetic sequence or unknown origin
  source 1..3252: mol_type = other DNA
atgaagtatgtaatgggattagatttaggaattacatcagtcggatgggcggtaattaatttagataaaaagagaattgaagatttaggagttcgtattttcccagggggagaaagaccaaaagatggaggttcattaaatgagaatcgcagattatttcgaggccaaagaagaagattgtcacgccgaagagttagaatgagaaaaataaaagaacttttagtggaacaaggtttgatagtcaaagaagaattagaaaatttttatcaattgaagaaagaggatagagatgtttggcttttaagagtagaaagcttagaaagaaaactagaagataaagaatgggccagagtattgacaacattagcaaaaagaagaggatataagtcaaatagaaaggatagtaaatcagaaaaagaagaatcaggaagagtattaaaagcaattcaattgaatcaaacaattatggaaaataaaaattatagaactgttggggaaatgttagtaaaagagacaaatataacaacagaaacgttagcaaagcaggcattaagaaataaagcagatcaatatgaccattgtgttttaagagaaatgttagtagaagaactaaaaacattatttgaaatacaacgaaatttaggtaacttaaaagcatcagaaagttttgaaaaagaatacttggaagtttttgagtatcaaaagccttttatgacaagagaattaatggaaaaaatgattggaaaatgtacatttgagaaagaagaaccgagagcttccaaaaatagctggacctttgaaagatttatgttgttacaaaaaataaacaatttaacatatagtacaggaagtgaaaaacataacttaagtcaagaagaaagagaaaaaataattacattagcgtatgaacaaagagagataaagtatacgacgttaagaaaaactttaaaattaccagatgatgcaagatttacaggactgaattattttattcgtaagaaaaaacaagaagaattaacagaagaaaaatatcgtcaagaagtagaaaaaacgacatttgtaaaattaaatggatatcatacgttaaaagaagcttttaagaaaaatgaaaagataggtctatggaaagaatttgaaaaagataaagaaaaattagatgatgtggcagaaactctaagcaaaagtaaaacagaacaagaaattcaaaaagaattagaacaaataggattaacaaaagaagagatagcaattgttaaagatgttaactttgacaaatatggtcatttatcctataaagcaatgaaaaaaatattaccttatttagaagaaggaaaaacttatgataaagcttgtgaattagcaggatataatttcaaaaatgaaactgaaaatccacaaaaaaaattacctccaattttacaagaacgaggtattaatcctgtaatgtatcgaacggtaacacaaactagaaaaattatcaatgcaatcattgaaaaatatggttcgccttacgaaattcatatagaagtagcaagagatttaacgaaaaatcgtgatgaaagaaataaaatacaaaagaaacaagaagaaaatagagctgaaaatgaaaagacaaaagaatatatcagagaaacattcaaaatagaaaatccaaagccggtagatattttaaaagtaaaattatggagagagcagggtggcaaatcagcatattctttaaaagcaatttctccagaacaattatttgaagataattatgtgcaaattgatcatgcacttccatttagtagatcatttgatgattcttataataataaagtattagtattaacaaaagaaaatcaagataaaaggaatttgacacctagagaatatattaaaaatgaagaagaatgggagcaatatgaagcttggataaaaacaacgtataagtataatccaagaaaacgtgagaatcttttaatgaaaaattttgatgaagaaagagcgggagattggagagctagaaatttagtagatacaaaatacattgctcgatttttagcaaattacattaagagcaatttattgtttgaagactatggtgaaaaatcaaatcgtattaaagtaaaaatgattccaggcggagtgacaacagcattaagacattattggggaatagccaaaaaagatagagaaacagatacgcatcatgcagaagatgctgtgattttggcctgtgcaaccaacgaatttattaacaaagtaatggattttagtaaatataaagaattatatcatgaatacaaagatggtaattatattgacaaagaaactggtgaaatcgtagaaaataaatataaaacacatgaaatgaaacgaccatggccagaatttaaagaagaattagaagctagaacgagtcaaaatccgagacatgatttagaatcaggacaatttaaaaattataatgactttaactttgaaaatttaaaaccactttttgtatcgagaatgccaaatcgaaaaattacaggacaagcacataaagaaacaatttattctgatagaaaaaatggagttgttgttattaaaacaagattacaagaattatcaggagaagatattaaaaatatttgtacgaaagaagaatataaagaattatacatgagtgacaagaatacatatgatgcaatttatcgacgaatggcagagtataactttaaagcagataaagcatttgcaccaggatatactattagaaaaaaagcaaaaaatggagagggcacaatcgtaaaaagtatcaaagtaccgagtaaaatgaactctggtgtaaaggtacaaggtggaattgcggcaaatggcggaatggttagagtagatgtttttgaaaaagatggaaaatattatttagtaccagtatatgtagcagatttagtaaaaggagaaataccaaacttagcaatcatggctaataaacctaaatcagaatggacgtttatggatgaaagttataattttaaatttagtttgtttttaaatgatttggtctatgtaaaaaaaggagaaaaagaaattttaggttactatgtttcaacacatagtggaaccggggcaattaacttaaaatcaccaaatggacaatctgaatatgaaggtataggcgtaaaaacattagataaatttgaaaaatatgaagtagacttactaggtaattactataaagtaaaaaaagaaacaaggaaaggaggtaaaagcagactaaagaaatag

SEQ ID NO: 133 - DNA, 3264 bp, unidentified
  misc_feature 1..3264: note = Synthetic sequence or unknown origin
  source 1..3264: mol_type = other DNA
atgcaccggtacgcgataggcttggatattggcataacgtccgtcggctgggcggcgctggctttggacgcagaagagaatccctgcggcatgttggattttggctcgcggatctttaccggggctgaacaccccaaaacaggcgcgtcgctcgccgcgccgagaagagaagcgcgcggcgcgcggcgcagactgagacggcacaggcaccgcaatgagcgtatacgccgtcttatggtatctggcgggcttatttctcaggaacagcttgagagtctatttgccggacagctggaagatatttatgccctgcgcacacgcgcgcttgacgaaccggtcacgcgggaagagctggcgcgaataatgctgcacctgtcacagcgcaggggcttccgttccaaccgcaagggcggcgcggatgcggaggacggcaaactgctggaggccgtgggcgataataaacgccgtatggatgagaagggctatcgcacggcaggggagatgttctttaaggacgaggcgtttgccgcgcataagcgcaataagggcggcaattatattgcaaccgttacgcgcgcaatgaccgaggacgaggtgcacagaatttttgcggcgcagcgcggttttggcgctgaatatgcaaatgagaagcttgaagcggcgtatctggacatactcctgagccagcgctcgtttgacgagggaccgggcggcgatagcccgtatggcggaagccagatcgaacgaatgatcggcacatgtgcgtttgaaccggatcagccgcgtgcggcaaaggcggcgtattcgtttgagtatttttcacttctggaaaagctcaaccacatccgccttgtcagcggtggaaaaagcgaaccgctgacggacgcgcagagaaaaaaacttatagagcttgcccataagcaagatacgctcagctatgcgaagatccgcaaggagctggagctgaacgaagcggtgcggtttaactctgtgcgttatacggatgacgccacgtttgaggagcaggagaaaaaagaaaagatagtctgcatgaaagcgtaccacgcaatgcgcaaggcggtggacaagaacgcaaaagggcgttttgcctatctcaccataccgcagcgaaacgagatagggcgcgtgctgtccacatataaaactagcgcgaaaatagaaccggcgctggcagcggcagggatagaaccgtgcgatattgcagcgctggagggactgagctttaccaaattcgggcatttatcgatcaaggcctgcgataagcttataccgtttcttgaaaaaggtatgaactataacgatgcctgcgcggcggcaggctatgatttccgcgggcacagcaaggatgggagacagatgtatctccctccgctcggcgatgactgcacggagatcacaagccccgtcgtgcgccgcgcggtctcgcagacgatcaaggtcataaacgccataatacggcgctatgggacaagcccggtgtatgtgaatattgagcttgcacgcgaaatgtccaaggactttgccgagcgcaataagataaaaaagcagaacgacgacaatcgcagcaaaaacgagaagataaaggagcaggtcgccgagtacaagcacggcacggcgaccgggcttgatattgtgaagatgaagctcttcaacgagcagggcggtatctgcgcgtattcacagcgccagatgtccattgaacggctcttcgaccccaattatgcggaggttgaccacattgttccgtacagcatcagctttgacgaccggtacaaaaacaaggtgctcgtgctcacggaggagaaccgcaacaagggcaaccggctgcctctgcaatacctcacaggggagcgtcgcgatcgctttatcgtctgggtgaacaacagcgtccgcgattttcagaagagaaagctgctgctgaaagaagaactgacgccggaggaggagaacgactggaaggagcgcaacttgcaggacacaaagttcgtgtccagttttctgctcaattacataaatgataatctgctttttgcgccgtctgtgcgccgcaaaaagcgtgtcacggcggtcaatggtgcagtgacagattatatgcgcaagcgttgggggataagcaaggtgcgtgaggacggcgaccgtcaccatgcggtggatgccgtcgttattgcctgcaccaccgatgcgctgatacaaaaggtttcgcgctatgaatcgtggcatgagcggcactatatgccgacggagaacggcagcatacttgttgacccggcgacgggcgagataaagcagacgtttccgtacccgtgggcgatgttccgaaaggagcttgaggcgcggctgagcaatgacccctcgcgcgcagttgccgatctgaagcttccgttctatatggacgctgacgcgccgccggtcaagccgctgtttgtctcgcgtatgccgacgcgcaaggtgacgggcgcggcgcataaggacactgtaaaaagcgccagggcgctggcggacggggttgcgatcgtcaggcgtccgctcactgcgctcaagctcgataaggatggggagatcgcggggtattataacaaggacagcgaccgcctgctgtatgacgcgctgaaagcgcggctcacggaatatggcggaaacgcggcgaaggcgtttgctgaacctttttataagccgaagagcgacggcacacccggaccggtggtgaacaaagtcaagctgacagagccgacgactctcagtgttcccgttcaggacggcacgggcattgcggacaatgattccatggtgcgcatcgacgttttcagagtggtgggcgacgggtattactttgtgccggtgtatgttgcggacacgctcaagcaggaacttccagatagagcggtggttgcaaatagacagtataatgagtggaaacaaatgtctgacgatgattttgtgttctccctctatcctaacgatttggtgaaggtaagacataaacgcgggatgaagcttactaagtgctttgaagagagcacattgccagcaaccatggattgcaaagaaagtatgttctattatatcagcagttgtatttcaactggcgcaatttgctgcataacaaacgacaatacatacgcaataaagagcctcggcataaagacacttgagagcatagaaaagtacacggtcgatattttgggtgagtatcaccccgtaaagaaagaggagagacagcggttcaacacaaagcgaggttaa

SEQ ID NO: 134 - DNA, 3264 bp, unidentified
  misc_feature 1..3264: note = Synthetic sequence or unknown origin
  source 1..3264: mol_type = other DNA
atgaattatgtagtgggattggatataggaattacatcttgcggctgggccgcgttggaactgaatgaaaaagatgaaccgataagaattgtcgatttaaattcaagaatttttgataaagcggaaacgcccaaaacaggagcctcacttgcagcaccgcggaggatggcaagaggaatccgtcgtctcacaagacggcgtaaattcagattgcacagagtccgcggttttttagtgcaaaatcatattttgacaaaagaagaaattgataatctttatcaggaggcacataaaacaagtatttatgaacttaggtataaagcgttgtcagaaaaagtcagtccctctgattgggcacggcttcttatcttcttcgcaaagcatcggggattcttatccaatcgaaaaaacagcaagtccggggaagacggtgtgatgcttaccgctatcagggaaaacgagggtattttaaaaaaatactgtaccgtaggagatatgatttaccgggacgaaaaatttaaagagcacaaaagaaacaaagggggtacttatcaatttacggtcagccgggccatgcttacagaggaaataaaaactttatttcaaaaacaaagagaactggggcaaccttttgcaggaaaggaagcagaagataaatacttgcagatcttctccgcacaacgaaattttgatgaaggtccgggaggaaacagcccttatgcgggagaccagatagagaaaatgataggggactgtacttttgaagatgggacaaacggaagacccttaaaaaaaagagcacctaaggcaagttatgcttttatggcttttaatctgtggcaaaaaattaatcatatcagggtcgactataagggcgaccaacgaagcctgacattggaagaaaaaaataaagtagctgatctggcatggtcaaaagaaaatatcacctattatgatctgagaaatacacttcatattgaagaagaagctcgttttaaagatgtgtcctattcttataattcgacatcggaagattcggaaaagaaagtaaaattcagctgggtgaagccttaccatgcgatgcgaagagctttagaaaaagtagaaaaaaattatatcaaaaaagtaagtcatgaagagatagatatcattgcttatgcatttacggtctataagaatgacgagaaaatacgttcctctttgaaagaaaaaggaattggagataatgtggctgatacattgctcgctcatttggatggctttagcaaattcggacatttgtcggaatatgcctgttacaaacttctgccgtttttggaagaaggaaatgaatactacaaagcttgtgaaatggcaggctatgacttccagaaatcttctataaagaaaatgaaagatatacctaatccggtcgtaaagagagccattactcagacactaaaagtgattaaagcgattcaacgaaaatacggagatcccgtggaagtgcatatcgaactggcaagagaattggcacggagctttaaggatagaaaagtaatggacgaccagatgaaaggaaataatgcgagaaatgaaaagatcaaaaagacgctgtcagaagaattcggtgtattgagccctacgggccaagatattgtgaagtggaagctttgtgaagaacaaaacaatgtttgtgcttatagtcaaaaatcctttgatgtacataggctgttgcatgaaagtgattatgcagaagtcgatcatattcttccttacagtcgttcttttgatgactcataccgtaacaaagttctagttcttacaaaggaaaacagggaaaaagggaatcggacacctatggaatatttagcggataagccggagcagaaagaaaaatttatcacatgggtgaaaacgacaatcaaagacagtaaaaaaagagaacatttacttcgcataaagtattctgaagaagaagagaaagagtggaaagaaagacatttgcaagatacccgttatatcacccgttttctctataattatctattgcagaatttaaaacttgcagcgggatatacggacagaaagaaaagaatcaaaccgattaacggtgcagtgacgggatatattcgaaaacggctgggcatctcaaaaatacgggaaaacggagatcttcatcatgctgtcgatgcagtagtcattgcagctacgacagagcgaatgatccaacgagtagcaaaatacagcaggactcgggaggggtggcgtaagaaaccccaagaaagagaagtttttccggaaccgtggtttagcttccgaaaagaactggaggctcgggtgagtgaaaatccggaagaagtaatcaaaaacttgcatttgccttcttatcagggggtcatggatatcaaaaaaccgttcgtttcccgtatgccgagacggaaggtacgcggtgctgctcataaagaaacggttcgaagcggtaaattactgaaagaaggctataccatctataaaacagatttatcagatctgaaactgaaaaatggagaaatagaaggctattatcaacccgagagtgatcgtcttctctatgaagcgctgaaaagccggataaaagatactgaagaacgtataaaagctgaagtagataacaaaaaggaacgagatgcaaaattagccaaaatcgggcaaatagcttttaaatcacctttctataaaccgaaagcggacggaacaaaggggcccttggtaaagaaagtaaaaatcatagagaaatcgagcctgaacgtgcctgtccacaagggaaagagtgtagcatataatgatgtgatggttcgtgtcgatgtgttctgtgtagagaaaaaagggaagaataattattatcttatacccgtttatgtggctgatacggtgaaaaatgaactaccccgaagagccatcgttgcacataaaccttatgaagagtggaaaatcatggatgataaagattttattttctccttatatccgaatgatctgatccacatagtatcggcaaaaaaaatatctttatcggcggtcaaaggatcaactttagaatccaaaattgaaacaaacgatgcctatctgtattataaaaagactaatatttcaacaggtgctatttcagtaattacccatgataatagtcatgaaatgggaagtttgggggtaaggacactcttaaaaatagaaaagtgtgtggttgatcctttaggaaatatttcacttgtaaaaaaagaaaagcggcaaagttttcgttaa

SEQ ID NO: 135 - DNA, 3267 bp, unidentified
  misc_feature 1..3267: note = Synthetic sequence or unknown origin
  source 1..3267: mol_type = other DNA
atggaatttgcatacggcattggtttggatattggcatcgcgtcgatcggttggtcggtggtggcgctggatgcggacgcacgcccttatggattgatcaagctgggttcgcgtattttcgagaaggcagaacagcccaaaaccggcgagagcttggcgctaccacgtcgcactgcgcgtggaatgcgtcgccgtttgcgccgcaaggcactgcgcaagcaggatacttacacgtttttggaaaaatatcagatcgcagatcgcgatacaatgcagcgtttgtttgatgcggggcatctggaggatgtttacgcactgcgtgttcgtgcgttggatgaggcggtcacgaaggaagaatttgcacgcattttgctgcatctgatgcagcggcgcggtttccaaagcaaccgccgcaatgcgggcggcgaggacggcgaattgctgcgtgcggtgaaggaaaaccgcgcgtgcatggagcaaaacggataccgaacagtgggtgaaatgctgctcaaaaacgaacgctttgccgcgcacaaacgcaacaaagcggaaaactatctttccaccgtcgggcgcgacatggtgacggaggaagcacgcattttgttcgagcgtcaacgcgagcttggctgtgcgtgggcgagtcccgaagcagaggcagagtatttgtcgatcctgttgcgtcagcgcacgttcgacgaaggtcccgctgcgcctagtccctatgcgggcaatcaggtggagaaaatggtagggcgctgtacgctggaaccggatcagccgcgtgcgcccaaaagttgcgctacgtttgagcgattcacattgctgcaaaaggtgaatcatatccgactgatcgttcagggaaaaactgtgccgctgaatgaagaacaacgacaaattgtgatggaattagcgtacaaaagcgcagatgtcgatcacgcaaaaattcgcaaagcattgaatctggcaccagaagtgcggttcaatgatgtgcgctaccaaggcgaagaaaaggactttgctaagtgcgaaaagaaggaaaagctgcccgcgctgaaaggctggcacgcgatttgcaaaacactgggcaaggatgctgcagaaaagctgagcgaagaaacacgggatgaaatgatccggatcctcagtttgtataaaaacgataccgcccgcattgagcgtttgatgcagttgggctttgaccgtgcggcggcggaggcactgtgcgagctgaatttctccggcttcggacatatttcgctcaaagcgtgtcgcaagctgatgccgtatctggaaggaggcatgacctacgaccaagcgtgcacggcagcgggttatgatttccgcgcacacacaggcaacgataagggcaaattcctgcctgccgttatccccgaaatggaggatatcaccagcccggtcgtgcggcgttctgtagcgcaaacgatcaaggtggtgaacgccatcattcgcgaacagggacacagtccggtttatctgaacatcgaactggcacgcgagctgcgcaagagcttcgaggaacgcgccgagatggatcgttcgatgcagaaaaatgcggcgtacaacgagcaattgatgaaggaaattcgcgaaacgttccacatcatcagccccaacggacaagatctggtcaagtacaaactctggaaagagcaggacggaatttgcgcgtattccggtgaaaaactgcacgcggaaagcctgttccaagcgggttatgccgaggtggatcacatcatcccgtacagcatcagttttgacgacagctacaacaacaaagtgttggtgctgaaacgggaaaatcagcagaagggaaaccgtctgccgctggaatacctgaaaggggaaaagcgggacgagttcattgtgcgcaccaaccgcatggtgcgcaattaccgcaagcgtcaaaatctgctcaaagaaaagctgaccgaggaagaacagcagggcttcaagctccgcaatctgcaagacacccagcaaatggcgcgtttcctgctcaactttatccgtgattatttgcagttcgaagagcaccccgccgcaggcaaacagcgtgtaacagctcttggcggcagcattaccgcacacctgcgcaagcgctgggggttgagcaagattcgcgaggacggcgatctgcaccacgcactggatgccacggtcattgcttgcgcaacgcaaggcatgatacaagaaatatcgaattatagcaaacgaaatgagatgcgattcgagcgggaatacatccaagacttcgacggaaacggctcgatcgaccgtcgcacaaaagagcatttccctgcaccgtggcagcacttccgcgatgaggtggacattcgcttgtccgatgcgccgcaagaaggcttgttgcatctcaatccgcgattctatgcagaatattgcgtagaaaatgtaaaacctgcgtttgtttctcgtatgccacatcgcaaggtgaccggtgcggcacacaaagaaaccatcaagggtgcaaaggcactggatcagggcattgtcacggtaaaacgcgcgctgacggaactaactttggacaaaaagacaggtgaaattgcgaattattatatgccgcaaagtgatgcattattgtacaatgcattaaaggaacgactgcaagcctttggcggcaatgcagagaaagcctttgcggagccgttctataaacccaagtcggacgggacacgcggtccgctggtgcgcaaggttaaattgtgcgaaaaagccaacctaatggtgccggtgaacggcggcagcggcgtggcaaacaacgacagtatggtgcgcattgacgtgttctatgtaccggacgacggttactattgggttcccatttatgtggcggacaccctgaaaccgacgctgcccaatcgagcggtggtggcatataagccttatcaagaatggcaagaaatgaaagacgaggattttattttctcgctgtatccgaatgacttgatcgaagtggagcacaaacgaaagctgaaattcaccattgccaacagcgagagcagccgcccgaaaacactggaagtggggaaagcgctggtatactatgtgagcggtaatatttctgttggatcgattacgatcaagacacatgacggatcatatgtgattgcaagcatgggcatcaaaaccttgaaaagcatcaaaaaatttgaagtcgatgtgctgggtaattatcacgaggtgaaaaaggaaaaacggcagacttttcgtaaaaaatga

SEQ ID NO: 136 - DNA, 3270 bp, unidentified
  misc_feature 1..3270: note = Synthetic sequence or unknown origin
  source 1..3270: mol_type = other DNA
atgaagtatgcaattggactggatattggtattgaatcggtgggctatgcggtgctggagctggactctcacgatcagccctttcgcattgagcggctcggcagccgcgtgtttgacagagcagagcatcctaaagacggctcctcgctggctgtgccgagacgggaagcgcgcggtgcacgccgtaggctgcgccgtcaccgtcaccgcctggagcgcatccgcgggttgatcctgtcctcgggcatactgagcggtgctgaactggatgccttgtacaaggggcaactggaggatatctatgccctgcgtaccaaggcgctggacgagcttgtgtcgcgagaggcgtttgcgcgtattttgatccatcttgcacagcgcagaggctaccgctccaatcggaaggcagatgcggccgataaggaaaacggtgtgctgcttgccgccgtatccgaaaaccaaaagcgctgcgaggaaaagggctatcgcaccgttggcgaaatgttctatcgcgacgaggcatttgcaatatataagcgaaacaaacaggccaactatctgaacacggtggaccgtgcatcggtcgaggcggaggcgcggctgatctttgccgctcagcgcgaacggggcgcggcgtatgcaagcgaggagacagaggcggcatatctggatatactgctttcccagcgctcctttgcggaaggccccgcctgcggtccctacagcggcaatcaggtggagcggatgcgcggtaagtgtacctttgaggaggggcagcttcgtgccgccaaggcctcctactccttccagcttttcaatctctgtcagcatatcaatcacatccgtctgagtgcaaagggcgtgaccagaagccttactgatgaggagcgtcagcaggtgtatgagctggcgcacgagaaagcggaggtgacctttgcgcagatccgcaagctgctgcatctggcggaggatgaggactttgtgggtatccgttacgaggcgggagcgcgcgccaaggcggagaaaaatgccaagctgaaggatctggaaaattatcacaagatccgcaaatgtatttcggcctattcggcggaggcatttgccgagctgagctacgatcagctggatgccattggcgaggcgctttccaaaaatcagtcggatgcggatatcaccggcgagttgaccgccgccaagctgtcgccgcaggtgatcgaggcgctgttgaccctgccaaattttgcaaagtttggacatttgtcggttatggcgtgccgcaaaatactaccctttttgcagcagggatatacctatgacaaggcctgcgaggcagcgggatacgatcccaaggcaaacaatgggaagcccgagctgtatctgccgtctttgcctaagaatcagagcgagatcaccagccccgtcgtgctgcgtgccgtgtcgcagaccatcaaagtggtcaacgccatcgtgcgcgagatgcagggcagtcccgtttatttgaatattgagctggcgcgagagctcgctcatgacaagaaggagcgggatgagatcaaaaaggcgcaggataaaaacgcggaaaccaatgagcagctgatggagcagctgcgggaatatactgacggcaagatcggcggtcaggatctgatcaagatgaagctgtggcaggagcaggacggcagatgtatgtactccggtgaggctattgagatcgagcgattgaccgagcccggatatgtggacgtggatcacatcgtgccctacagcatctgctttgacgaccgcatggcaaacaaggtactggtgctgactgccgaaaaccgccaaaagggaaatcggctccctttgcaatatctgcagggcaaaaagcgggatgacttcatcattcgggtggagcagtctaacttgaaatacgcgaaaaaaagccgcctgctgaaggaaagcatttcggacgaggcggagtggaagcagcgcaatttgcaggatactcaatttatggcatcctacctgcatcggtatatcagtgagcatttgctgttcgcaccgtcggatagcggccgcaagcgtcgcgttaccgcggtaaacggtgccattaccgcctacgtgcggaagcgttggggcatccgcaagatccgcgaggacggcgatctgcaccacgcggtggatgcggtggtgatcggctgcatcacccagggtatgatcaaccgcatctcccgttactcttattataaggaaacaaaagataacggcgattatatcgtagacgagcagacgggtgagctgatcaccagattccccacgccgtgggcgcattttctggatgagttgagcatccgcatgacacaaaacgcaaaaaatatgcgcaagcaactgttcgatgccaattacgacagctatgcggagatcgatctggaaacggtgatgccgcccttcgtatcccgtatgtgcaatcataaaagcacaggctctgcccatctggaaaccgtgcgaagcggcaagctgctggatcaggggaaggtaatttccaaggtggccctgactgccctgaagctggatgccacgggtgagatcgccaactactataatccggaaagtgatcggctgctgtatgaagccttgaaggaaagattgcaggcgcacggcggtgatggcaagcgagcctttgccgatggggagttccgcaagcctaaggcggacggcacccccggtcccgttgtcaaaaaggtcaaggtcatcgataccgtatccaatgtggtgcaggtgcaggaccaaacgggcgtggcaaataacgagactatgctacgctgcgatgtgttccgggtggaggatgacggctactattttgttcccgtctacgtggcagataccgtcaagccacagctaccctccctggcacccatcgcgggcaaggatgcagacggcagaaagcgatggaagcagatgcgggaagaggattttctgtttaccctataccccaacgacctgatccgcatctattccaaaaagccgttttccttgaacgtggtcaacaaaaaaagcaccctgcccgagaaaatgaccgtcccgggcgaggaaggcgtgttcctgtattacaggggaatgaacatatcgactgcggtattgaatgccattacacacgacaacacctattcacacgattccatcggtaagaccatgcagcgcattgaaaaatacgaggtggacgtgctgggcaatatccgcaggatcggagaagaaaagagaaaggatttttcacacaaaaagaaataa

SEQ ID NO: 137 - DNA, 3270 bp, unidentified
  misc_feature 1..3270: note = Synthetic sequence or unknown origin
  source 1..3270: mol_type = other DNA
atgaaaagatatgcgattgggcttgatatgggtgtggcttcggttggatgggctgtactggcactggatgaggaagaaaagcctattggcattattgacctgggctcaaggatatttgatgcggcggagcaaccaaaaaccggggcatcattggcggcaccacggcgtgaagctagaggtgccagacggagactgcgcagacatagacatagaaacgaaagaatcaggggaacaattttgcgctatggacttctaactaagcaggagctggatcagctgtttgacggacagttggaggacatctatgcgctcagagtcagagccttggacgagccggttagcagacaagaattcgcaagaatacttatcaacctttcacagcacaggggatttaggtctaacagacgcaatgcagttgacggggaggacggcaaactgttgaccgcagtcaacgaaaataagcgcattatggagacagaggcatatcgcacagtgggcgaaatgctactaaaggataaacgcttcgaggaacataaacgcaacaagggcggggactatatttcaaccgtatcacgagatatggttgaagatgaggttcactgcatttttgaagcgcagagaaagtttggcgcagattttgccgacaaagccttggaaagcgattacatagaaatattgttaagccagcgctccttcgacgaaggcccaggtggaaacagcccttacggtggcaaccagattgaaaagatgattggcgagtgcacttttattgagggcgagccgagagcggcaaaggccagctattcttttgaatatttcagctttttggagaaaataaatcacattcgccttgtgaacgggaaagaaagtgtacccctcagcgaagctcagcgcaaaaagcttatagaactggcgcacaaaagcgacagcctaaactatgccaaaataagaaaagaactctctattgatgatgactataagtttaacatggtcaggtatgacaagagcagtgaaattgttgaagctgctgaaaagaaagagaagctggtttgcctgaaagcataccatcaaatgcgcaaggccataaattcgctgtctaaggatttgtttgcgcaggtcactaaagagcagagaaatacaatagcaacagttttgagcctatataagagcagcgaaaagattgaagctgcactaagagcgaaaggcatagagccgtggctcatcgacgcagcggacaagattggtaacttcagcggatttggacatctttcaataaaagcctgcgatatgcttataccgtacttggagcagggcatgaattataatgaggcctgtgaagctgccggatataatttcaaggtgcataaaagcgaagaaaagagtaagtatctgaaatgctgccaggaggattttgaggacataaccagtcctgttgtgcgccgctccattgcccagaccataaaagtgctcaacgcaattatcagaaagcaagattgcagccctgtttatataaatgtggagcttggcagagagcttgcaaagaattttcaggaacgcaataaaataagcaaggaaaacgaagagaacaacaagcgtaatgaagccgccatggagcgcttgaaatcagagtatggtctgctcaatgccagcggaaacgatttggttaagtttaagctgtttcaggagcaggatggaatttgcccctattccttgaagcatatacaaattgaacatctgtttgagccaggctatgccgaagtagaccacatagttccatatagcattagctttgataacagctataaaaataaagtgttggtgctggcaaaggagaacagggaaaagggcaacagactgccaatgcaatacctaacgggtcagcgcaaagacgatttcgtggtatgggtgaataacaacgtaaaggattacagaaagaggcagaatcttctgaaagagagcataagcgaggaagagaagaagcagtggaaagagcgcagtctacaagatactaagtatgcttcacggtttatgatgaaccttatcaatgatagactgctgtttgccgaatccacaaccggcaggaaaaaacgtgttacggctgtcagcggccagattacctctactttgcgcagccgctggggcataaacaagataagagaaaacggcgatactcatcatgccgtggatgcagtggtaatagcctgtgccaccgacggaatgatacagcagatttccagaaatgtgcggctgagagaatgccagtatatgcagcatgagagcgggagccttgccatagatagcagaaccggcgaggtattcagagagtttccattcccctggcctgatttcagacgggagctggatgcgagactggcaaatgaccctgcacgagttatcaacgacctgaagctgccgttctatatgaatagtggcgagcccttgcctaagcctatttttgtatccagaatgccaaagcacaaggtaacaggagcagcacacaaggaaacagtcaagagcggcaaacatattgaagagggtattgtacttgtaaagagaagtctgaaagacctgaaactgaaaaacggagaaatagagaattattataatccggatagtgatagacttttgtacgaggcattaaaggcacgattgcaagagtttaacggcaacgctgaaaaggcgtttgcggagccgttttataagcctaagagagatggcagtcaaggccctcaggtaaagactgtgaagctggtagaaaagaccacgttgaacgtgccggttcagaataaccaggccgttgccgaccatgacagcatggtcagggttgacgtgttctatatagatggcgatggctattatcttgttcccatttacgttgccgatacccttaaagcagaattacccaataaggcttgtgtagcatttaagaattattccgaatggaagcctatgagcgatgataattttgtgttttctctatatgctgatgaccttataagagtggaacataaaaaagaaatgaagtttgcgctgactcacaaggaaagcagcctgccacccgaatataatacaaaagacaagctagtttattacactggaatgaatattgccacaggaaatataagcattgaaacacatgatggggcgtataaaataggcagtcttggggttaaaacattgagaaaatttgaaaagtataccgtggatgtattgggcgagtatcacaaggtagaaaaagagaagagaatgaaatttaacattaaaaactga

SEQ ID NO: 138 - DNA, 3273 bp, unidentified
  misc_feature 1..3273: note = Synthetic sequence or unknown origin
  source 1..3273: mol_type = other DNA
atgaataaatacgcaatcggtcttgacgttggtatagcttcggttggttgggctgttgtaaaacttgatgaaagcgaaaaaccctgcggtatcttaaaaatgggatcccggatttttactgctgccgaacatcctaagaccggagcgtcccttgcggcacccagaagagaagcacgaggagcaagaagacgcacaagacgtcatcgccacaggaatgaacgtattcgaaacttgctcataaactcaaatgtaatatcgcagagcgaattggacaatctgttcaacggcaagttggaagatatttattctctccgtgtaaaagcgttggacgaagctgttactcgtgcggaatttgcccgcatgctgattcatatttcccaacgaagaggtttcaggtccaatcgtaaggaaggagcctccgcagaggatggaaaactgctgacagcggtaagtgaaaacagacagcgtatggaagaaaaaggctaccgtactgtcggcgaaatgtttttgaaagacccgctttttgagcagagcaagagaaacaaaggcggggattatattgccacagttgaccgctcgatggtggaagaagaagttcgaaagattttttctgcgcagcgaggctttggagcaaagtttgcatcggaggaactggaatcagcttacctgtccattcttctaagccagcgttcctttgatgaaggacccggcggcaacagcccgtatgcgggcaaccagatagaaaaaatggttggcagatgtacgttctatccggaagagcccagagcggcaaaagcgacctactcttttgagtatttcaatctgcttgaaaagatgaaccatctgcggcttgtttccggcggcagcagcatcacccttaattcggagcagaggacaaagctgcttgatatggctcacaaaagcgaaagcattacatatgccaagataagaaaagagctgcccatcccggaggaatacacctttaacctagtgcattacgccgatgatgtggctgtggaagaatctgagaaaaaagaaaagttttcttatttgaaaagctatcataagatgcgcaaagccctggacaaggtttctaaaggtcgcatcgtcggtatgcccatagaacaccgcaatgctattggtacggcgttgtcttattacaagacatccgaaaaaattaccgagtatctcacggaagctgggcttgagacggttgatatcgatgcagccgaaggcataggaaacttttcaggattcggtcatctgtctgtcaaagcctgcaacgagcttatccctttccttgaacagggcatgaactataatgatgcctgtgcagcagcaggatttgacttcaaggctcacagcggcggcgaaaaaagcaagctgctgcatctgtctgaagaagatatggaaagcatcaccagtccggtggtcaaacgctccatatcccagacggtcaaggtgatcaatgcgatcgtcagagatcagggcgaaagcccaatatatgttaatatcgagctagcccgggaaatgtccaagaattttaacgagagaacgaaaattaaaaaggaaaatgaggataatcgggctaaaaacgcagctgttcttgagcgcatacagtccgaatacggttggcacaacgcttccggtcttgacatcgtaaagatgaaactgtatgaggagcagggcggagtttgtgcctattctcaaaagaacatctcgctggaaagattgcttgaaccggggtataccgaagttgaccatatcatcccctacagcatcagctttgacgacagctacaagaataaagtccttgtactgacaaaagaaaaccgcgacaagggcaacaggcttccgctgcaatatctgacgggagaacgcagagacaagttcatcgtttgggtaaatgcctgcgttcgagatagcaaaaaacgcaaaatactgcttacagaaactattacggacgacgataaaaagaagtttatagaccgcaatttgcaggatacaaaaaccgcttccagattcctgctcaactacatcaacgacaatctggagttcgcaccatccgactgcggcagaaagaaaaaagtcaccgctgttaatggcgcagttacgtcctatatgcgcaaacgctggggaattaccaagattcgagaggacggcgatctccatcatgcggtggacgcactgaccgttgcctgcaccactgacggcatgatacagcagatctcccgttactccgcatatcgcgagtgcgaatacagtccaacggacgtggctagcgtggcatacgatccggataccggagaagttatccgtcagttcccatacccgtggccgaacttccgcaaggaactggaagcccggcttgaagatgatcccggcagagttatcagtgagcttaaacttcccatgtatgagcttggcttaattccggttcccgaaaaaccgatttttgtttccagaatgccaaacagaaaggtttccggtgcggctcataaggataccgtaaaaagcccaagagctttggatgatggcaaagtagttgtcaaaaagagcatcacagagcttaaactgaaaaacggtgaaatagaaaactattacgaccccaacagtgatcgccttttgtatgatgccctgaagaaacgtctggaagcctttggcggagacggcaagaaagcctttgccgaagactttcataaacctaaaagtgacggcacaccgggtcccatcgtaaagaaagtcaaggtatacgaacccacaactttgaatgtttcactccacgatggtaagggagtggcagacaatgattcaatggtcaggatagatgtgttccatgttgaaaacgatggttattatcttgtgcccatttatgttgccgacaccctgaagccggaacttcccaataaggcatgtttagcacataagccatattctgagtggaaagagatgaaggatgaggactttgttttcagcctttatcccaatgacttggtggaagtttgccacaagaaagtgatcacattaagcgtaagcaataaaggcagctcgctgccggaaactctttcagacaaaagcatgttattgtattacacgggagcagatatctcgacaggagccatagcaggcgtaacccatgacaatgcatacaaagcacgaggaataggcataaaaaccctggcatccatgacaaagtacactgtggatgttctgggagaataccacaaagtaggaaaagaaaaacgtcagccttttaatatcaaaaggaggtaa

SEQ ID NO: 139 - DNA, 3273 bp, unidentified
  misc_feature 1..3273: note = Synthetic sequence or unknown origin
  source 1..3273: mol_type = other DNA
atgagatatgctataggacttgatgttggtattgaatcggtgggatattctgtattggagttgaattcttacgatacaccgagaagaattgaatctttaggggttcgtatatttgacagagcagagcaccctaaagatggttcatctttggctgctcccagaagagaggctcgtggtgcgagacgaagattgcgtaggcatcgtcacagattggaaagaataagaggtttgataatttcatctgaaattttaacaaaagatggacttgaatctttgtatgatggtgaactatcggatatttatgaattgcgtacaagggcactggatgagttagtatcagcagaagatttttcaagaatactaatacatttggcacaaagaagaggttacaaatcgaacagaaaatcagaggtatcaaatgaagaaagtgccgggaaaattctgacagcggtatcggctaacaaaaagctttgtgaagaaaaaggctatcgcacgataggtgaaatgttttaccgagatgaaagattttctgaatataagcgcaacaaaaatgacgattacagtacaactattgaccgtcagtctgtagaagatgaagcgcgtatgattttcaaatcacaaagagtaaaaggtgcgaaatttgccgacgaaaagattgaaactgcataccttgatattttgcttggacaacgttcttttgcagaaggtcctgccagtggtccgtacagtggaaatcaaattcaaagaatgcgaggtatgtgtacttttgaggcagatgaatttcgtgcagcaaaggcatcatattctttccagttgttcaatttgtggcaacatataaatcacatacgtttaatacgtggtggagaaaccattgctcttaatgatgacgaaagaaaacttatttttgaattagctcacgaagtaacagagttaaattatgccaaaattcgtaagcatttaaagatatctgatgagtacaattttgcggggataaggtatgaacaaggaaaatcagcagaggctgagaaaaagtcaaaaattaaagaccttgaagtgttccacaagataaaaaaatgtgtgactgcggtgtcaagtaacggctttgaagagctaacgcacgaacaacttgatgcaattggtgaagcgttgtcaaagaatatgtccgatgatgatattttgaaggctcttgaagaagcaaagatttgtagacccatatcagaagcacttttggaattaccgaatttatcgaaattcggacacctttcagtgaaggcttgtagaaaaattattccgtttttggaaaagggatgtacttatgataaggcttgcgaaggtgcgggatataatttcaattccgtaaaaaaagagctgaaagtttacttaccacctgtctctaaaaatgacaccgaaattacaagccctgttgtaaagcgcgctatttctcagacaataaaagtaatcaatgcaattataagggatatgagtggtgtttcacctgtttatatcaatatagaacttgcaagagaattgtcaaagaattataacgatcgaaataaaataagaaaatctcaggacgaaaatgccaagaaaaacgaagaattgatggagcaactcaaagaatacggaggtactcccggtggacatgacattatcaaaatgaagctttggaatgagcaggacgggagatgtatgtattccggagagacgatagaaataggacgtttgacggagccgggatacgttgatgttgaccatatagttccatatagtatttgttttgatgatagattggttaataaagtacttgtattgtcaaaggaaaacagacaaaaaggaaatcgtttaccgttgcagtacttacagggtaaaaaacgtgatgattttatagtgcttgtaaaccaatcacatttaaagagtgagaaaaaaagacgcttacttatggaaaagatttccgatgaatcggaatggaaacagcgtaatttgcaggatacacagtttatttcttcgtatctgcgcagatacattgacgaaaatctgatgtttgctcctttttatgacaacagaaaaagacatgttatggcggtaaatggtgctataacttcttatgtcagaaaaagatggggtataaacaaggtaagagaagacggcgaccttcatcatgcagcagatgcggttgtaatcggatgtataagtcagggaatggttaaccgtatttcaaattatacttattataaagaaactaaagacaacggagattatgtaattaacgaagaaaccggagagcttgaaacaagatttcctaccccatggaagcattttaccgatgagctaaatatccgcttgacacaaaataaaaagagccttcaaaaaatgttgtttgatgttaattatgacagttattccgatgtggatatagaagaaatacgtcccctctttgtgtcccgaatgcccaatcataaggttacaggttccgctcacgaagcaactgtcaaaagcggtaggcttgaagaagtgggatataccgtctcaaaagtatctcttactaaattaaagttggataagaatggcgaaatccaagggtattataaccctgatagcgacaaattgctttatgaggctttgaagaaaaggcttttggagtttgacggcaacggagaaaaggcgtttggcaatattgccttttacaagcccaaatcagatggcacacaaggccctcttgtcaaaaaagtcaaggttgaagacgtgtcctcaaatatggtaaaagtacaacaagggtccggggttgcttcaaatgacagtatggtacgttgcgatgtgttttacgttgagaatgacggctactattttgttccgatatatgtagccgataccgtcaaggctgaacttccgaatcttgcacctatagcagggaaggattcaaatggtcaaaaaaagaaaaaagtaatgaaagcagaagattttatgttttcattatataggaatgacttgatacgaatttattcaaaatcgaccattacggttaataaagttaaccagaagagtacattgcccgaaaaaatgactgtacccggagaagaaggattgttcctttatttttcgggaatggatgtatctgttgcatttttaagcggtataacacatgacaatacatataagcaccgttcaataggtaagacgacactttgtatcgagaaatatgatgttgatgttctcggaaatgtgagaaaaatagaaaaagaggaaagaaaggattttttaaacagaaaaagataa

SEQ ID NO: 140 - DNA, 3273 bp, unidentified
  misc_feature 1..3273: note = Synthetic sequence or unknown origin
  source 1..3273: mol_type = other DNA
atgatttatattattggtttagatgtaggtattagttcagttggttgggcagtaataagagtagataaagattgtaggagaatagaagattttggagttaggatttttgattcaggagaaactagggatagaaaacaaagtaagtgtcaggaaagaagaagttttagaggctctagaagacttatccgtaggagaaaacatagaaaagaccgattaaaatattttcttaatgagatttcttttgtaactgaaaaagagatgaaggatttttatggacataataatcatgatattattgatttaagggtaaagggtttggaagaaagattaacaccggaagaattgactgcctgtttattacatattgcgaaatttagaggttataaacctttttatgattttgaaaaagttaatttaaagaccgaggacggaaaacttctcctacatatgaatgaaaccaataaaataatcgaagatggtggttatcgttctgttgctgaagcaattcaaaaagattcttattttaaagaagaaacaactggaagatatagattccataacaaaagtgataagaacgatattttgttttctaatggtatgattaaaaaagaagtagagactatcttgaattgtcagaaacaatattattcacaattaagtgataaaaatatagaaaaaattaatgatattattttttctagaagagattttgaagatggccctggtaattcaggtgataagaatagaaaatataccggtttctatgattcaattggaaaatgtagattctataaagataaaaatcgtggttgtagatttacagttctaggtgatgtatttgcattgattaataagttatctcaattcaagtatgtttcaattgaaaccggtgaagtggataagatgcccaaaaatttgatgcatacaatcataatgaaagctatcaaagatgcatctcttacaaagaagggcattattaaaattgcaaaagaacaaggttttacattggtaagtggtaatgaggaaaaagatgataataccgatataactaactgcttgaagtttgtaaaacctatgaaaaaaatatttgatgcagatgatagtggttttgagtgggaaaagttaataaatgaagatccaacaaatatggatagtttattaaacagaataggtgtgttgctctcttacaatattactccaaatagaagattagaaaaacttaattctatttctgaaatcagagataatgctattgttgaaagattatcaaaagttaagctatctggaactgctaatgtttcaaatgagtacatgattgatgcgataaacgcgtttagagaggggcaattgtatggcgattttcaagcaaatgtaattaaggacgatttttcttccgataaaaatgccacaaggcacaaaaaattaccacctttcacaaaagactctgaaatttatgataatcctgtagtatttcgttctgtaaatgaatgcagaaaagttgtaaatgctataattgaaaggtatggtactcctagtgcaataaatattgaagttgcaagtgacttaaatagaagtgctgaaaatagaaaaaaattagctaacaatcaaaagaaaagacgtgacaataatgcatcggttttgaaaaaagttgctgatttattaggcgttgaggaatctgaaattacaaagtcacaacttgacagatttaaattagctgaacaacagggctggcgcagtatgtattcaggagataatctttattcagatgataaaggaaaaataactgacaaagataaaaaagctattatcctaaatactaataaggtgtatgaaattgatcacattattcctttttcaagaattcttgatgattcattgaacaataaagttcttgtctttgcaaaggaaaatcaagataagtcagataggacaccactgatgtaccttgaaggtgattcgagaaaggaatttattaagagggttaattcattttaccaatcaaaaaatgaaaacaaagagataggctctataagcaaaattaaatatagctacctaatgttagatagcttaactagtgaagaaactctaaagtatcttgaggagtggaaaataagaaatcttaatgatacaaggtatatgtcaaaatacttaatgaagtattttaatgacaatcttttatttgaagagaataaagacagcagaagaccacctgtgtatgcagtaaagggtgcaattacctcaatgttaagaaaacaatggcttaacaaaaaaacttggggtaatctagacaagaaaaaactaaaaagtgttactaaccttgaccatgctattgatgctatagtaattggcaattgtcttccggcttatgttgaaattgcagttgagaatatcaaacttcgagatatttattattcctcaggtaaaaagaaaactgaagaatattataggagtagagacacatttattgataatctatggaagttttatggtgttcctaaaagtgaatctgcaagattacttgagaaaatgacagaaaccccatcattgataaataaccttcgacaagaagtggaatgtagagtacaagattatggtactatgcagttctttagtaaagatgataatggaaaaactaaagaggaatgggatgaaatatacagaagaaatataactaatttctatgtaggtcagaaagactttgtggattctattcaaatgccaattgtttctcataaacaagataaaagatttagaggcaaaattgctaatagtaattttgttaagacaacagacgatgtttctaaattttacaagaaacaaatcgatgaaaacaattttgcatacatggatgatagaagttattattgtgttgatgtttataaaaaccataagggcaacaccaaaattactgccttaaaatataatgacattataaagaaaaacggtaagttatatcttaagcaagattataaatttccagaagattatcgagaacatttgatgtacctatattccggagactttattagtgttgaaaataagaatagtaagtattatggttattatgtatctgtaaaaaatattaatagaaatttgcttaatatagatgaatgtttttatgagaataaagtgattgattacaaaaaacgtattgaaagagcaataactgaaagatctattgtaaaaaaatactacatagatattttagggaaaattggtggtgaaatttataaatgtggagaaccgttatcatatcttccggagaaagattga

SEQ ID NO: 141 - DNA, 3273 bp, unidentified
  misc_feature 1..3273: note = Synthetic sequence or unknown origin
  source 1..3273: mol_type = other DNA
atgaaatacggaatcggtctggattgcggcatcgcctcggtcggctacgcagtcatgcagttggacgaaaacgacgacccctgtcggattattcggctcggaagccgtgttttcaacaaggcggaaaatccacaagacggcgcctcgcttgcagcccctcgccgggaagcgcgcggtatgcgccggcgcattcgccgtcatcagcacaggctcgagcgcattcgctatttgttggtttcgtccggcgtgttgtcaaagacggagctggacaatctgttttgcgggcagctcagcgatatttatatgctgcgcgccaaagcgttggacgagccgctgaccgccgcggagttttcgcgcgtgctcattcatttggcgcagcgccgcgggtttcgctcgaaccgcaaaaccgacgcacaagataaagaagccggaaaaattttgagcgctgtttcggaaaacacggaagaaatggaacgcggcggctatcgaaccgtcggtgaaatgttttataaggacgagaaattccggcaatacaaacgcaacaaaggcgatgattatgccgccacggtggcgcggagcatggttgaagacgaaatgcacaaaatttttgaagcgcaaaggcgcttcggcatgtcgtttgcaagtaaagctttagaaacgcaatacacggaaattgcgctttcccaacggccgtttgatttaggtccgggcgcaggacctaaaaacgcgccgagccgctatgccggcgaccaaatcggccgcatgatcggcccttgcacccttttgccggaagaaaagcgcgcgccgaaagcgtcctattctttccaggtgtttaccctttggcaaaatatcaaccatttgcgtatcgccgcgcccggcaaagaagcacacgggcttacggatgaacaacgatgggcggtttttgagctttgccaccaaaagaaagatgtgaaatacaccgcgcttcgcaaacttctggcgcttcgcgacgatgaatttttctcgattctttcttacggcgcgaaagaggccgccgaagtcgaaaaagcggcgtttaactttttaaagccttatcatcaaatcaaaaccgctttaaacaagttgggaaaagattatatccgcaatctttccgccgacgaactcgacgacatcggctatattctcacggtgcaaaaaacagacgattcgattcgcccggcgcttgaagaaaaaggttttgcgcccgaagtcattgacgcactgctttcctgcgggtcattttcaaaattcggtcacatttcggtgaaagcgtgtcaaatgctgatcccgtatcttgaaaaaggcatgacctatgacaaagcctgcgacgcggcgggtctggattttcgcgcgcacagcaaaacggaaaaaagcctgtatctttcggcaaacagcgactatctttgtgatattgtgaacccggtcgtgcgccgggcagtctcgcaaacaattaaagtcgtcaacgcgattatccgcgaacaggggtgtagcccgacctatttaaacattgaacttgcgcgggagctttccaaaacctttgacgagcgcaaaaaagccgaaaaaagcatgaaagacaacgccgcgctgaacagccgcgttgtggaacgcctgcaaaccgaattcggaattgtcagcccgacggggctggatattgtcaaattcaagctgtggcaggagcaggacggcatttgcccgtattcgcaaaaaccgattttgctcgaaaagctgtttgccccgggctatgtggacgtggaccacattattccttacagcatttgttttgatgacagttacaacaacaaagtgctgacattcagcaaggaaaaccggcagaaagggaacaaaatcccgatgcagtatctgacaggcaaagcacgggacgattttgaaatttgggttgcaaacaccattcacaaccgcgtcaaacgccagcggcttttgaaaacggagctgaaacccgaagacaccgaaggctttaaaacgcgcaatttgaacgacacaaaatatttaagccgcgttttatataactttatcaacgacacccttttgtttgcggattttgcaagcgacaggaaaaaacacgtccgcgccgtcaacggcaaggtcacttcttatatgcgcaaacgctggggtatttcgaaaatccgcgcggacggcgatttgcaccacgcggtggacgccgccgtgattgcctgtgtcaccgagcgcatgattcagaaagtctcgacctattccaaatatcacgaaatctattatgtgtcagacgacgagaaatcgtttgcggtggattttaacggcgaagtgattgacgagttcccccagccgtatccgtatttccgcaaagaacttgacgcgcgcaccatggccgacgccaagcgcgcggtgaaagactgccgcttcccccactattccgccgcgcaggaagaagccgtgcaaagctgttttgtgtcgcgcatgccgatgcacaaagtgacgggcgccgcgcatttggacaccattcgttccgggcgcgaaccgggctttgtgatttccaaagtcccgcttgcaaaattgaaactcgacaaagacggcgaaattcaaaattattacaaccctgaaagcgacaccctgctttataacgcgctgaaagcgcggcttgcggcttacggcggcagcggcgaaaaggcgtttgcgccggaaaacggcccgatgtataaaccgaccgcgtccggcgaacccggtccgttggtcaaaaaggtaaaaatcattgaaaaatcctctttgaacgtgccggtgcgtgacgaaaacggcgtggcggcaaacagcgatatggtgcgaattgacgttttcaagccggaaaacgacggttattatttcgtgccgatttatgtttccgacaccgtaaaacccgaactgaccaacaaagcgtgtgttgcttttaaaaatgcctccgagtggaaagaaatgcaggaagcggattttctcttttcggtttatccgaacgatttactgcgcataaatgcgaaaaaagacataaaattcaccgtttccaacaaagacagttccctgcccaaagaaattttacgcaatgatgttttggtgtattacaatagcgccaacatacatacagcctctattttagttttactgcatgataattcgtatcgtttagaaggtctcggtattaagaccctattatctcttgaaaaatacaccgtagacccgctgggcaattgcagcaaagtcggcaaagaaccgcgtcagcggtttcggtaa

SEQ ID NO: 142 - DNA, 4074 bp, unidentified
  misc_feature 1..4074: note = Synthetic sequence or unknown origin
  source 1..4074: mol_type = other DNA
atgaaaaaattttatttaggcatggatataggaacggaatccgttggaatggcttgcacggatgagaattacaatttacttcgtgcaaaaggcaaagacttatgggctgttcgtttgtttgatgaagcaaaagatgcatctgaacgcagaataaaaagaacagctagaagaagattgcagcgcagaagacagcgcgtagaatttttacagggaatatttgctccttttatggaagatgaattattttttattcgtctaaacaatagcggtttttttgaagaggataaagatgaaagattgagtagtcaattttctttatttaacgaaaaagactataccgatattgatttttatagggaatatcctaccatttttcatttgcgtcaaaggttatgctgtggtgaaagggcagatttgcgccattactatttagcgttacatcatatcattaagtatcgtggacattttttattcgagggtgaagacgttaacggtataagagatattaaaaaattgtttgaaaactataacaatgcagttgaagaaatagagatggatgatttatatctcttggttgaaaaagctgaagaatttagaagtttagcaatggaacgcaagggattaaatgataaaaagaaggcgatagtgaaactctttaatgcaacttcccctcagttaaaagaaatgcttgctcttttaataggtgcaaaggcaaaaatgtctgtaatatttggcgaagaatatgaagaaaaatataaagatgaaaagatttcttttaaagaaattgatgatgatgcctttgaacaaaaaagtgagatttttgaagaagaacaatttgcaatattaaaaagagcaagggaaatatacaattttattgtgttagaaaaggttttggaaggtaaaggtacaatatcggaagcaatggttgccctttatgataagcatgctgaagatttaaagctattaaagaagctagtaaagcaaaattattcaaaagaaacgtattataaaatttttagaagtctaaaagaaagcgcaaactacgttaattacgttggttacaataaaaataaaggtaagaagattaatgctagtaaaaaatgcaaaaaagatgaattctatgcgtttttaaagaaaaatttaacagaaattcaaggtgaaggggcagaaattctaaattacgttaaagcggaaatagaaaacggaacgtttttgcctaaaatacttaacgcagataacggtttattcccacaccaaataaacgggatggaattagacttaattttacaaaatttagcaaaaaattaccctgaattcgcagataaagatgattctggttttactgcttgtgaaaaaatcaaaaaaacattcttgtttaaaatcccatattacattggacctttgaataccgcgcatgaaaacggtggaaggggtaacagttggatgcgtagaaaagaaggtaaaatagaaagaattacgccttgggattttgatgaaatagtagataaagctgcaagtaacgagcaatttattcgccgaatgactaataaatgcacttatttgcacaatcaagacgtattgcctaagggttctatgtattatcaagcctttaacacacttaatcaaataaacaaaataaagttagataccgttcctataagtgtagagttaaagcaagagctttttcataatttatttttaaagaataaaaaaataagtgtaaagcaaataagggagtatcttgtattaagcggaagatgcactttagcagaagcaaaagagctttctattggtggatttgatacggaaattgggttaaacgcaactatgtcctcctataggctttttgcagataagttcggggctatggtggatgaaaatcctgaaatatttgaaaacattattttgtggcacacattaaataccgataagggtatagtagaaaatttaattaagcaaaaatacggaacaattccccaaataaaagaaaatattaagtggttaaaggggttaacctcgtttaaggaatttggtagattatctaaaaaattgctagatggaattattggtggtatagatcctgcaaccggtgaagcttatactgttttaaatagattgtataatacgaattacaattttatgcaaattatggaagtttatgaatttgcaaaagcggtggaagaagaaaacagtggattaaaggaagaaatcacgtatgaggacgttgcatcactatatgtttcaccgatggtgcgccgtggaatttggcaatcccttattatggcggatgaatacgtaaaagcagtgggtaaagcacccgataaaatatttatagaagtaaccaggcgcgatgaagagaaaaaacgtactatttcacgaaaaaacagtttacttgccttatatgaccaaataggggaagattgcgccaatatagatgagcttgtaaaagaacttaattgtgatgaaataacagattctaaattacgccaagaaaggctatatttatatttcttacagcttggtcgttgtgcttacaccggtgagcgcatagagcttaatcagcttgcaaccgatctatatgacgttgaccacatagtgcctcagtccataactaaggatgacggtatagataataaagttttggttaaaagggttaagaatgcgcaaaaaacggatatttatcccttgcctttaggctttactaatcagcagtcattttggaagcttttaaagattaagggcttaatgagtgaaaataagtatgctaaactaacaagggtagagccgttaacggaagatgattttagggaatttacaaatcgccaattggttgtaaccaatcaaacggtaaaagcggttgcagagctattaaaggcaaaatacggtgcatttggaacgaaaatagtttacagcaaggctattcacgtggatgaattcaaacagaaaaacgaaataattaaatgccgtgaaaccaacgatttgcaccacgcacgcgatgcttatttgaacgttgttgttggtaacgtttatgataccaaatttacctctgctatggattattattaccgcaaggcagatgattcttggcgtgaatacaatttaaaaacgttattttatcgcccaatagaaggtgcgtgggcaggaagtgaagatattaatcgtattaaaaaaatcgttgcaaaaacaagcatgtctgttacccgttatgctgtaactaaccacggtgcattttataatgaaaccgtttataaaaaggatgataatgcaacgtatccgcgtaaaggtaaagccccctatgatcaaacggaaaaatacggcggttttaaatctcccgcaacggcatattttgcgatagtaaaatctaaagataaaaagaacaacgttataaaaacaatagaagccattcccgttatggttgattatgcagtaaaaaataatcaaaatgcaattattgaatacttgcacggtatgggcttaattgagcctgaaattatcgttcccaaaataaaaataaaatccttagtttctattaacggttataaggtttggcttgccggtatgactgggaaacaaatacttattcacaatgcacagcagtggtttacgaattcaaacacggatttatacgttaaacagcttataaagcttatagagcgcgatagagcaggcaggctttctattttagaaaaagagcaagagcaaatccccttgatgagcaatagatttaatgataacttgtatgcaactaaagaaagtaatttgcaattatacgatgcaattattaaaacgctaaataagaatatctaccaagggttatcaagtgtaaagagttttgctttaaaaatcggtgaaaaaagagatttgtttattgctttaacaacctttaaccaaattaaagtattgttgcaaatcattagatttatgaagtgtaatgcggaatgtgcggatttaacgttacttgaagacggggcgacttgtggaaagttgctgataggaaaaaatattactgacgttgagtttgccattatacatcaatctgcttgcggattaacagaaagagtgcaaaaaatataa

SEQ ID NO: 143 - DNA, 3294 bp, unidentified
  misc_feature 1..3294: note = Synthetic sequence or unknown origin
  source 1..3294: mol_type = other DNA
atggcttacgcaattggtttagacataggtattgcttctgtgggttatgcagtagttgcacttgattatgaagaaaatccatggggtatcatcaatatgggttctaggatttttgatgctgctgaaaatcctaaagatggggcttcgttagctgctcctagacgtgaggcacgtactggtagaagacgtttgcgtagaagaaaacatcgtattgaacgcattaaaaatttgtttttaaatactcaactgctgacaaaagaacaattagagaagttgtatgaaggtgttttatctgatgtttatgaattaagggttaaaggtttagatgaaaagctgacggctgaagaagttgcccgagttttattacatttggcacatcgtagaggctttaagtctaatcgtaaagcagaaaaaactgataaagaaaatggtgcattgcttactgccgttagtgaaaaccaaaaacgtatgaaagataagcaatatagaactattggtgagatgttccataaagacgagctttttgcagaatacaaacgtaataaaggtggtacatacttaacaacagttgctagagaaatgattgcggatgaagcaaaatatattattgctacacagagaagctttggtaataaaacattgacaatagagtttgaagaaagttatttagatatacttttaagtcaacgtaattttgatgaaggacctggtgggaatagtccgtatggcggtgaccaaattgaaagaatgataggaaactgcacatttgagaaaagtgagaagcgctgtgcaaaatcttgttattcttttgaatactttaatttgttgcaaaaaataaatcatttacgattgttagtagatggtgtgaaggttgaacttgatggttctcaaaaatctaaagttataaatcttgcaaaaacgaaggcagatttaaaatatagccaaatcaggaaggaattgggattaggttcgcaagttctattcaatgctctagtttataattctgatgtagaagaagtagagaaaaaatcaaaatttaattttatgcctgcgtatcatcaaatacgtaaagaattagatacagttgtcaagggaagaatagaagctatagacatagatactcttgatgaaataggaagaattttatcaacatataagagtgatgctaaacgtatagaagcatttagtaatttgaatataacttcaaaagatatggaagcattgcttaatattaatggtttaagaaaatttggtcacttatcattaaaagcgttaaagaagattacaccttttttggaacaaggaatgatttataacgaagcttgtactgctgcgggttatgagttccgtgggcatagtggttatgaaaaaactttcttactaccgtcacaaacagaagaaatggaaaatgttactagccctgtggcaagacgttctatttcacaatccattaaagttattaatgccattattcgagaacaaggagaaagtcctttatacataaacgtggaacttgcaagggaaatggcaaaagattttgatgaacgcaaaaaaataaaaaaggaaactgacgaaaaccaagcaagaaacgaaaggctgatagaaaaaattagaaatgaatttcataagcagaatcctacagggttggatttagtgaaattgaaattatgggaagaacaagatggtgttagtccttactcacaaaaacaaatagttattgaaaggttgtttgaaccagggtatgtagatgtagaccatattgttccctacagtatcagctttgatgatactatgaaaaataaagtattagtttttgcttctgaaaatagagaaaagggtaaaaacctgccagtagaataccttgcacgtaaaaaaggacaaaaggctgttgatgactttaaggtatgggttactagtaatgttagaaattacaaaaaacgacttaacttgttaaagtcagaagttacggaagaagacttaaataaatttaaagagcggaacttgcaggatacaaaaacaatttctcgttttatgtataactatatcagtgaccatcttatttttgcaccgtctgaaactggtaagaaaaagcgtgttactgctgtcaatggggcgataacttcctatttgcgtaaacgttggggtataaataaagtgcgtgctgatggagataagcatcacgctgttgatgctttggtaatagcttgcaccacagataaactgattaaagaccttagttatcactcaagatatctcgaaatggaatacgaagctggcgaaaaagaaagtttgtgggtaaatcgtaatactggcgaaatagttaaacgttttccttatccgtgggaagattttagagcagaactaatggcacgtttatcagatgctcctgaagttgctttaagaaaattgcaattgttatattaccaagataaggatttaagtaagattaaacctatttttgtgtctcgtatgccacggcgtaagattactggagcagcacataaagctacagttcgtggggcacgttacgttgataaggggattgtaatttccaagaaatctttgagtgagcttaaacttaataagggtggtgagattgaaaactattttgctcctgaaagtgatagactactgtatgaggctttgaaggaacaacttaaaaagtttaatggcaatgcaaaaaaagcttttgagcaagggttttataaacctaaagcagatggtacgcctggtccaaaagttaataaagtaaaggtttatgataagtctactttaaatgttgccgtgcaacaaggaactggtgccgctgataatgatagtatggtaagagttgacgtttataaggtagaaggagatggttattaccttgttcctatttacgtggcagatactttaaaaaaagagttacctaataaagcaatagtacaagggaaaacttatgagcaatggaaagaaatgtcaccagaagattttgttttctctttgtatcccaacgatttgataaagattactcacaaaaaggagataaactttagtagagttagcgaagatagtacattagctgattcttacaaaacaaaagaagagttcgtttattataaaaagactagtatttcaacagctagtataagcataataaacaatgataatacatatactattcctagtttgggtgtaaaaacattagcttctctagaaaaatatcaagttgatattttgggtaactataccaaggtaggaaaagaaaagctacaaacatttgctgcttatcaacaagctaaaaagaagccttga

SEQ ID NO: 144 - DNA, 3297 bp, unidentified
  misc_feature 1..3297: note = Synthetic sequence or unknown origin
  source 1..3297: mol_type = other DNA
atgaaacacattcggtatacccttggtatcgacatcggtattgcatccgtcggatgggcggtgctgcaaaacgatgtctacggtgagcctgtgaagatagatcgcctaggggttcgcatctttgaaagagctgaaaatccgaaggatggatcgtcattggcggctcctcgtagacaggcgcgcggtagccgccgtgtaatccgcaggcggaagcatcgcaaggatcgcatcaaaaagttgattgcatcctctggtatgatggaacaggagcagatcgacacactgttcactgccggacggtttgaaaaaagtgtctatgagctccgggtggatgcactggagcgaaagctgagtgtggaggaaacgatccgtttgctgattcactttgcccaacgcagaggttatcagtcaaacagcaaatcggaagaagcaaaagatgcgaaagaaaatggaaaggtaaagcaagcgatttcggacaatcgccaacggatgttggagcacggatatcgcaccgtgggcgagatgttttggaaggacgatctgttcaaacgtaccaatccggatggtagtgttgtactggtggttcacaatcagccggatgactataaagttacggttgaacgacagatgctgcgtgaggaacttcaattgatgtttgcccagcagcgtgcatttggaaatgaatgggcatctgaggcgttcgagtctgcgtatctggaaatttggggcagccaaagaagctttgatgaagggccgggcggaaatagcccctatggtggaggccagatcgagcgaatgctgggcacctgtaccttcgaggaggatgagcctcgtgcgccaaaggccagttacactgcggaatattttcggctgctgcaaaccgtgaatcatttgaagactgtgggccgtgggctgccaccggaatttttggatgaggagcagcggaaacttgtcgttgaatttgcccttgcttctcccaatggaacctatggacaacttcggaaaaagctcagcttgccggatgatgtttactttaacaatctgtactatggaaataagagcgcagtagaggttgaaaagaaaaaactgggcttgatgccattctatcacaaagtcagaattgcattggatcacgtgaaaaagggcgcgattcaggaattctctgcggagcagctggacaaaattgcgcgaatcttaacgctctataagagcgatgacaacagaacccaatatcttcgaaaagcccaaattccggagcaatatatcccggagttactggcactttctgcatcaaaggcagcccatctctccatcaaggcgatgcagaagatgatcccttatttggaagatggttgtacctatgacaaggcgtgtactgctgtttatggtcggcatgatggtaagaagcctggcgaaaagcgtagccagaagctggatattggcatggcgggcgaaatcacaaatccggtggttcgccgtgcagtttcccagacgatcaaggtgatcaatgcggtcgttcgggaatatgggccaccggaagtggtccgagtagagctggcgcgagaattgggcaaaccctatgaaatccgcactaagctggaaaaacggcagagcgcaaactttgaacaaaatgcggccattcgcagtcaaattgaggagtataagaaggacacgcccacaggactggacattgtcaagtttaagctgtatcaggagcaaaatggagtgtgtctgtactcaggtgaaaatctggacatatccagactgttcgaagcgggctacgtggatatcgaccatattattccatatagcatttcctttgacgacagctatcacaataaagtgctggtgcgctctagagaaaatcgccagaaggggaatcgcattccctatgcgtattttggtcaggatgaggtcagatggaaccgttttgagaccttggtcaacactcagatccgcagttttaaaaaacgcaaaaatctattgtgccataccttgagccctgaacaaattgacggctttaagcagagaaatttggtggatacccagtatttatcccgcgttatatttcggttgatcgatgagcatttggagtttgcggagaccggaaatgttaaacgcaagacccagacggtaaacggtgccattaccgcacaggtaagaaagcggctgggaatcgacaaggttcgtgccaacggagacctccaccacgcgaaagatgctgcagtcatcgcctgtatctctccgggaatgattcagaaaattacgcgctattcccagcgctgtgaatgcgcctggaccagagccggctatgtggattatgaaactggagaagtgatgacaaaagaagcatatgatgagaagtatgcgccgcgtttccctgcaccctggccccaattccgcgcagagctggaggcgcggttgagcgttgaccccagaggggagatcgaccagcttaaacttgcgacgtacgacagcgatgaagcacttttcccggtttttgtctctcggatgccaaaccacaaggtttctggcccggcgcaccaggagacgatccgcagtggaaagcaggcgggtggaaccgtcagcaaagttgccttgtctacgcttaagttggataagacgggagaaattccgggatattatcggccggaggatgatccgctcctgtacgaggcattgaaagaacgccttcgcgcctatgacgggaagggagataaagcatttgctgagccattttataagccaaaacataatggcgaaccgggaccggttgtcaagaaggtaaaagtgttcgataaggccacgttgacagtgcccattaatcatggcctggctgccaatggcaacatggtgcgcgtggatgtgtttcgggtcgaggacgagggctattactttgtcccaatctatgttgccgacacagtaaaaggagaactgccttgtcgagcggtagtggcacataaagcggtcgagcaatggaaaggaatggacgagaaggattttgtgttctcactttacgccggagacctcgttcatattgtcaaccataaggctatcaaattaaacctggcaaagggagccgagggcaacgaagttgcgctgaccaatgacgcgttgctctactatacgggattaaacattgcaacgggagcgcttggacttacaacgcacgataggcgttattgtcaatctggcttgggcggaaaaacactcgatctaatcgaaaaatatcaggtggatgtgctggggaactatacgccagtacgcctgccggagaagcgcatgaggttccaatga

SEQ ID NO: 145 - DNA, 3312 bp, unidentified
  misc_feature 1..3312: note = Synthetic sequence or unknown origin
  source 1..3312: mol_type = other DNA
atgagtagacttgtatttgcgtatgatctgggaatcggacaaacaggatgggctgttgtggatgccgacagtagagacataatagagagcggggtaaataatttcccatccggggatgcagctgaaaatcaggaaagaagaggatttcggcaaatgagaaggatgcacagaagaaagaagacccgtatggcggattttgaaaaactttgggtttcttccggtttttccgtgccgacactatcttatacagatgttctgtcacttagaaacagaggactatccgagaatcttacggaagatgagatattttatgttctccgctttatgttgaaatgcagaggtatttcttatcttgaagatgaactcaacgaggacgcgaccggcgaatatgaaagagcaattgccttaaaccagaaagaacttcagaataaactgccttgtcagattcaaaaagaacgtatggataagtatggcgcctaccgtggtgagcgcgaggtggaaattgaaggggaaaaggtagcgctaagaaatatatttacaaccgatgcgtataagaaggagatagagttatttcttcaggtgcaggcaaggggaaacaagaagattacagattcttttgtaaagtcctatcaagagattttcagccgtaaaagggagtattatgtcggcccgggaaatgagctctccagaactgattacggaatatatactacaattaaaaatccggatggcactttccatacggatgaaaacttatttgacaagctgataggaaaatgttctgtttatccggaggaacgccgtgcggcagcagcctcatatactgcgcaggaattcaatgcgttgaatgatctgaacgatttggttattaacggacgaaaacttgatgaagaagagaagcggttaattattgaggaatacaagagctccggtgttgttaatgtaaacagaattctaaagaaagcaattggcgaaaacattgacagcataaccggatttcgggttgataaagatggtaaggaacttttccacacgatggaaatttatcggaaaatggttaaattttttgtggaaaagggaatggatataactacattttcgattgatgagctggaccgaatcggagaaatactgacgattaataccgaaaaggacggcattattaaggcttttcaaaatagttttgtaaagtgcgacgcaaatatagtggatgcgtttgtggaatttcgaagaaaaaatgtaaggatgtttaccaaatggcattctttctccgtcaaaataatgtctgaattaattccggaaatgtatgcccaacccaaaaatcagatggttcttcttacggacatgggggtattcagatcacgaagtgagagatttatcgaatgtaaggaaataccaatccgggagacaacagaagaaatatacaatccggttgtgcgtcgaagtgtgtctatggcatatcgtatcacgaatgctttgatagaaaagtatggttatccgtataaagtagtgatagagatgccgagagaaaccaattcagatgaagaaaagaagaaaataggagagattcagaggaagaacgaaaaagaattaagtacaattatcaagaaaatacgcgatgattacggatttgagattaaggatgaagacttcagaaatcataagggacttgtcctgaaactgaaactttggaatgagcagggaggaaaatgtctgtattccggaaaggaaataccgattgaccagctcgttaagaatcagggtttatttgaggtggatcatattattcccatttcgatatcctttaatgacagcagaagcaacaaggttcttgtttatgcaagcgagaatcagaagaaaggaaaccgaaccccgctgtcttatctttcaggtgtaaacagggaatggaatgatgaagtatttacggcttatgtaaagagtctgggatacggaaaagataaacaggattacagcggtaaagagaagttaaagaatcttctttttgcggaagatattacaaagcaggaagtcgttcaggaatttgttaatagaaaccttaacgataccagatatgcatccagagaggtacttaatacgcttaaggattatttcaaagcaaaggaggcaggaacaattgtttccgttatcagaggtgcctttactcatcaaatgcgcgtcaatctggaactcagcaaagacagagatgaaagctacaggcatcatgccgtagacgctatgcttattgcgttttcacaattagggtatgatgcatatcttgctcggcagaaacagattatagattttgaaaccggcgagatattggacaaggcaagctgggaaaagcaggattcactgtatcgtaaactggtatatcaggagacatggtatcagacaaggataaagattaacgaggcggagaaacaggtcaagttttatcataaagtagacagaaaatgcaacagaagtctgtgtaaacagacgatttacggaaccagggaatatgaaggggataaatatgttattgacaagctggatttatacgtaaattccgatgtggaccgtttcaggaaaatgatatctgacgggaaagaaaaagacttcctgatgtatgaaaatgatccgaaaacattcgagaacttaatgacggtatttcatcagtatgaaacggaaaaaaatccttttgttgcatataacaaagaaaccggggattttgtaagaaagtatgctaaaaatcacaacggacccaaaattgaaaagattaaattcagaaaagagaaactgggaagttgtatagatatttcccataagtacgggttggaaaagggatccggaagggtggctttgcgtagtttgaagccatatcggatggacgtataccgaaataaaaataccggattgtatcgtttcgtcggattgaagcagtcggatataaaatgccagggaaataattatgttatagatgaagaggcttatgcaaaaattttgctttccgagaaaatgatagagagtggacagaccagaacagatttgggagacagaggctgggagtttcaactgagtttttataggaatgacattatacagtatgaaaaaaaaggagtaatatacacagagcgttttttgtccagaacaatgcctgaggactgtaattatattgaaactaaaccgattgatgcgcctgattttaaaaagagaaatcttgttggactttcccaaacgaagagtgtggagaaaattataacaagcattttaggaaaccaaagaaatgtcaaaagagaaaaattttcagagattgttgacacgattcgttaa

SEQ ID NO: 146 - DNA, 3315 bp, unidentified
  misc_feature 1..3315: note = Synthetic sequence or unknown origin
  source 1..3315: mol_type = other DNA
gtggggataacatttggttttgatttgggaattgcttctgttggatgggctgtagttaatgatgactatgaggtgttagagtcatgttctaatatttttcctgcggcaaatgcttcggaaaatgcaacgagaagagggtttcgccaaagcagaaggctgactagaagaagaaagaatagaattagtgattttaaaaaattgtggaagtcagcaggatttgatattccagaaggatcaaagacggatgttcttgaattgagaatacgtggattgtcggaacaactatcagatagagatgtttttttcgttttattaaatagtttaaagcaccgtggaataacatacttggatgatgcagagagtggagatcagtcttctgattatgctaagagtattgcttataatgagacggagttgaaatctaagctgccctgtgaaatacaatatgaacgcatgcagaagtatggtgcataccgtggcaataacaccgttgatgtagatggcgaaccggttacgcttcgcaatgtgtttacaaaatctgcatacaagaaagaagtggaggcgtttctttcaaagcagtccgagttcaatcctatgctgacggctgggttcatgagtgactacatggaattattctcaagaaagcgtgaatattatattggcccgggaaacgagaagtctcgaacagattatggcgtgtatacgacagaattagacgagagtggaaaatataagacagaggcaaacttgttcgataagctgattgggaaatgtagtgtatatacagatgagcgcagagcagcaggcgcatcttataccgcacaagagttcaatatattaaatgatttgaacaatctgacaatccaatcggattcttcgaaattggaagatggaaaactaaccgaatcggctaaacgtgaaattatagagcaaatcaagacagcgaatgttgtaaatgtaaaacggataataggtgatgtattaggcgataagaattgtacaatttccggagcgcgtgtagataaaaatgagaaagaaatttttcactcttttgaggcttataataaaatgcgcagagaattgtcggatgtttatgatattaaaacaattccgcgagaagatttggatgatataggcgagattcttacattgaatacggatcgagagtccattctgaatgcattcgcgatgcgaggcttgaagtatccgcaagaggtagttgatgtcctaataaaagttcgaaagtcaaatggcgctttgttttcgaagtggcaatctttcggtttgacaataatgaaggagttaataccggaactatatgcgcagccaaagaaccagatgcaattgctgactgaaatgggcgtttttaaaaaccagtcggatcgcttcatggagtatgaggaaattccggcggatgtgctaacagaagagatatataatccggttgttgctaagacagtaagaataacagtacgagtactaaatgcacttatcaaaaagtatggtaacccggatcgcattgtactggaaatgccaagggacaaaaattcggatgaggagcagcagcgaattcgaaaagaacagcgagataatgagaatgaattaaacaatatacttgcaaaggtgaaaaaagattacggtcgcgaaataactaagaatgattttattaaccattcgaagctaacgcttaagttgaaactctggaatgaacaggatggggtttgtccatattccggaaagccaattcatattgatgatttattagataatccgtcgttgtttgaggtggatcatattattccgttgtcaatttcttttgatgatagtcgttcgaataaagtgctcgtttactcggaggagaatcagaaaaaggggaaccgtacgccttatgcttatttaacaggagtaaatcgcgattgggatttccataattacatgagttttgtgttggatcattattctggagctttaaagcggaagaaacgcgacaacttgcttaatgatgaggatattaacaaggttgaagtattaaaagggtttgtaaatagaaatattaacgatactcgttacgcgtcaaaggttgttctaaattcattgcagcaatactttgcgtcaaaggattgtaacacaaagatccgggtaattcgaggaagctttacccaccagatgcgaatgaatctgcaattggaaaaggttcgtgatgaatcatattcacatcatgcagttgatgcaatgttaatagctttttcgcaaatgggatatgaggcatatcgaaagcttacagaagaatacattgattatgacaatgaagaagttctggataaagatggatttaaccatttgttagatagggacgaagcgtataagaatgcgttatatcaggcgaagtgggttgcaattcgcaagactattcagaatgcagagaagcgaaataagtattggtatcaagtgaataacaaatgtaatcgtgcactttgcaaccaaacagtatacggaacccgtgagattgatggaaaaacatgcaagattagtaaactaagtatccgtacagacgatggaattaaaaaattgaaaggcattttggcgaaaggaaaaccggaacgtttcttgatgcgtcgaaatgatccgaagacattcgaactgttgatggatatatatcaacgatatgaagatgccaaaaatccattcttgcaatacgaagaagaaacgggcgagaagatacggaagtattcaaaaaaaggagatggaccggttatcacgtatttgaagtatgaagatggggaggtggtgagttgcattgatatatctcacaaatatggatttgaagaaggaagcaagaaggttattctggattctttgaacccatatcgtatggatgtttattacaataatacagatggacgttactattttgtaggagtaaaacaatcagatatcaagtgcgagggagatgtatatgcgattgatgcggagaagtatacgcgtacattaattaatgaaaaaatgcttgaggaggggcagacactagctgatttgccaaaacttgggtatgagtaccgtttgacgttctacaaggaagacttgattgagtacgaaaaggcgggagaaataaagtgtgaaagatttctgtcaaggactaaaccgcaatcgcgaaactatattgagacaaaaccgaaggatgcccccaagtttgaaaaacaaaatcagtttggtttagcgcaaacgaatcatattcgcaaaattgttacggatatcttgggaaatcaatactatgttgatcaaatgagattcaatatggttgtttcaaggagataa

SEQ ID NO: 147 - DNA, 3324 bp, unidentified
  misc_feature 1..3324: note = Synthetic sequence or unknown origin
  source 1..3324: mol_type = other DNA
atgatatcacaatctcttactttttcctttgatataggttatgcgtcaatcgggtgggccgttctcgaagccaatccggatggcagtcaggatgcggatcctgtcgttcagggttgtggaacagtactgttccaagctgatgactgccaggctttcaaaagacggtcttaccgacgtttacggcgcaacataagatcccggcgcatacggattgagcgtatagggaggctgttggtacagactcaaatcattactcagaacatgaaagatgctccggggcatccggctcccttctatctggcatctgaagcgctgcaagagcatcgagttctttctcctctggaactttggcaggttctccgttggtatgctcataaccgaggctacgacaacaatgcatcatggtccaacagttcctcggcggtagaaaataaggaagatacagagaaattaagaaatggtcatgagttgatgaagaaacatggaacctgttccatggcggaaaccatttgcagggaattgaagttggaagaagggaaacaggatgccccgatgagtttttcaactccggcttacaaaaccctcaatactgcttttccgcgctcccatgtgcaaaaggaagtccgtcagattctggaactttccgcgcctcaaattcccggactgactccagaaataattgagcttattgttcagcaagaattatttactacggaacagcgtgaacgtttgcttcaatttggaataaagctggcgcgccgttatcagggaggcctcttatttggtcagttaattccccgttttgacaatcgcatcattcggagatgtcccattacttgggcgcaaatttatgaagctgagttaagcctgggttcttctgagaaacaggcgcgggaaaaggcggaaaaactttccaaggttccttctgcggattgccaggaattctatgagtaccggatggctagaattttgtgcaatctccgtgctgatgatcagcctcttcctgcgtccttacgcaggcagctgatgaaagaggccctcaaggaagggaaattaacgaaatcttctcttaaaaaaataatttcctcccaggcattgacggaaaataccaatatagataattatttcaatctgcatccggacagtgaagaagctctttatttggatccggcggttgaggtcttgcaaagaaccggtattcacgatgttctttctccttcagtcaaacggatggccctgacacgcctgcgccgcgggaaaacctgtactccccgttatcttttaaagctgatgcgttcccatggggaacctgttgatcagcttgaagctaaaattgagaaaaggcgcattcaacaaggagaaagaaaaaaaggaaaggagcacgtaccagcgggaaaagattgggcagaggaacccttgcttcccaaatgcgctactggccgtgcaccatatgcccggccggttctgaggaaagttgttgaagaagttcttgccggggaagacccctcccgccctgccagggatgaaaatcatcctgacggggaagtaaaaacgcatcacggctgtctttactgtcttcttgatcctaagtccaaagtcaatgaatatcagcgtaaccgtagtattgactcccttaccaacaatcatcttgtcaggcaccggatgatgattgttgaaagattgctgaaggatcttatccaggatttcgctgcgggccggaaggaaagggttgagaaagtctgtattgaagttgccagggagctttcctccttctccgggatggacagtaaaaagattcaggcagagctaaatctgcgtcaaaaaagccatgccatggccgtcgagcgtttggaaaaggatctgcctggcctagccctttcagctaacctgattcgcaaatgccggatagctgaagacatgaactggacctgcccgttcactcttcaaaaatatggaccccatgatcttgaccgtttggaactggaacatatcgttccttatgcattccggcagtccaacgctctctcttctctcgtactcacctggaaagaggttaataaaatgaaaaaccgtcgcactggatacgattttgtagaacaatgcgaaggttcccctgttccaggatctaatcttagcatttgctccatcaataactataaaacttttgtcaacgggctggacgagagaaaatggcacgcggacgatcaaaaacgtaaaaagaaacgcaaggcattgttgatggtacgtggtctttccagcaagaatcaagcacaggccaacataggcatgacggaaggaatgatgacccagagttcccatttgatgaaactggccgcccgtgtagtttccaggattctgccggatgtctccattgacatgattcccggagcggttaccgccgcagtccgtaaatcctgggacgtttcagggtgcttcaaggaactttgtccggaactctccggtaaaatcaacaagcaggatttgcgctcctgtactcacttgcatcacgccttggatgcttgcgtcctgggtcttatcccttatatcgttccggctcaccgcaacggtttgctgagacgagttctggccatgcgccgtcttccggaagaactgatgcgggaagtcaggcagattgcggacaaacgtcactacatcctgaatgatgatggacgaataatgctaaaggaccttcccaactccgtcaaagaaaatatccgtgaaaaactgatggagcagagggtgatcaaacacattcccgcgaatatgagcggagcctccctgaaggaaaccatgcagagagttatttctattgaaggaaatggggaggatgccatggtatgccttcggaaaagttctttcatggttggcgaagatggcaaaagaactactgtaaaagcaaataaattggtgggaatttttccggaaggttcttccaagctgaagcctttgaaagcggccatcgaaattgatggtaactatggagtggctcttgaccccagtcctgttgttattcgtcatgtcagggtttttaaacaaatcctggctttgaagaaaaagaatggcggcaagccggtacgtattctaaaaaatggaatgcttattagattaacttccccacaggataccaaacgggaagggatatggagaatagcctccattaaagataataaagtggggatagcccttgatctccaaaggccccattatgccggttccggaagcaaaaaacacgaatccaattggattaatataagacttgtcaccttacgcacaaaatatcatctggaaatacatcctacttcttacaccgggaaccctcgataa

SEQ ID NO: 148 - DNA, 3333 bp, unidentified
  misc_feature 1..3333: note = Synthetic sequence or unknown origin
  source 1..3333: mol_type = other DNA
ttgcataacaggtatactgaatataagccctttgattgtttcataattggtggaaagacaggtattcgtatggataaatggaattatgctattggcctggatattggaatcgcgtccgtcggctggagcgttgtagcactggattcgcaaggtgatccttatggaatcataaagctcggatccaggatttttgataaggccgaacagccgaagaccggagaaagcttagcggctcccagaagacaggcaagaggattacggcgtgtgatcggccgccgggcactgcgcaaggaagacatctacaaactgcttgccaagcataatattgtaacaaaagagcagatgatggagatcttcaggaccgggcatctggaagacatctatgaacttcgtacaaaagcattggacgagctggttacaaggacggatttcgcaaggatcctgatccatcttgcacagagaagaggctttaagagcaatcgcaagagtgaatcttccgatgagggaaagctgaaggatgctgtacgcagaaatcagatcctaatggaagaaaaaggttaccgaactgttggagaaatgttcgcaaaagatgaactatattcccggcacaagaggaacaagggcagtgaatatacctcaacggttctgagggataacgttattggggaagccgtcctgattttcgaaagccagcgaagcctgggcaacagctgggcctctgaagaactgcaggaaagctacattgaaatactgagcagacaacggtcttttgatgaagggcccggcgagcctagtcccttccacgggaatcagatatccagaatggtcggcaaatgcacactggagcctgaagaaacaagagccgcaaaagccactgcgtctttcgaaaaattcacgctgctgcagaaaataaaccacatccgggtctcaaatgaagatggagagatggtccctttgaatgttgagcagaggcagaaggtcatcgatctggcatataaaacacctgatgtcactttcctgaagatccgcaaagctctggaactgcatgaatatgacaggttcaatctcgcacggtacagaacaaccgattcagttgagaaagcagaaaaagacgagaagctcaagtgcctgaacgcctaccatgagatgagaaaagcattggacggaatagaaaaagggcacattcagaaattcagtgatgagcagttgaacaaagcagcagagattcttaccagatacaaaaatgattcaaccgtcattaatctgcttcaggaagaagggtttagccctgaggaagcagatgctctttccgtactgtctttttccaagttcggccatatatccgtcaaagcatgcagaaaactgattcctttccttgaacagggactgacatacgataaagcctgtaaggaagccggctatgatttccgaggccacaattctgctaaatccatgtatctgccggcgaatacagaacagggtgcgcctgagttgcaggacataacaaatccggtcgtcagaagagcggtatcacaggccataaaggtcatcaatgcaataatccgggaacagggctgcagtcctgcgtttatcaacattgaactcgcacgggaactgagcaaagactttgctgaacgcaatcagatcacaaaggacctggaaaagaacactgcggaaaatgagcgcctcaaagaagaacttctggaactggtccacggcaaaacaattggcggtcaggatctggtcaagtaccggttatggaaagagcaggatggaaggagcgcgtacaacggcaagcccattgaaattgagcgtctgcttgagccaggctatgcagaagtcgatcacattatcccgtacagtatcagtttcgacgatcgccggagcaataaggtactggtctttgcgtatgagaaccgggagaaaggcaatcgtcttcccctgcagtatctggaaggaaaagcaagggaagacttcatcgttagaacagaaactactgtaaagcagtaccgcaaaaagcaaaacctgctgaaagaaaagaatacggaggaaaccgctgaattcaggcagaggaatctgactgatacacaatatctcgctgtgctcctgtacaacttcattacagatcatctggaattcgccgaagggacagaattcggaaagcgcagagtctttaccgtcaacggtgcaatcacctccttcctgcgaaagcgctggggattgacaaaagtacgggaggacggtgacctccaccatgcgctggacgcaactgtgatcgcatgtacaacgaacagaatgatccaactgatctccggctactatgcccgcattgaaggcacaccgtatttgagcaaaaaaggaaaggaactgtttccgcaaccttgggatcatttccgcgacgatctggtcctgaggttatccgatacgatcacacctgaatccctgtatctggtgaaccctgttttctatcacagttttggcgcagaaaacatcaagccggtcatggtatccaggatgccgcggcacaaagtaaccggacaggcacataaggaaaccctgaaaggaaccaaagccctgaaagacggttatctgaccaccaaaaagtctttgcgggatttgaaactgaataaagacggggaaattgcagactactataatccggaaagcgatctgctgctttatcacgcattaaaggaacagttgcaaaagcacagcggggatggaaaaaaagcgttcccggaaggctctcatttctataagcccaagagcgatggaacccctggtccggaagtcagaaaagtgaaactgattgaaaaatccactttgaatgtatctctgaatgatggaacagcattcgcagacaacggttccatggttagaatcgatgtattccgtgtcccggaggaagggtattatttcgtgcctgtttatgtagcagatactaagaagaaacaactgccaagcaaggctgtaattgcaggtaagccttacagtaaatggaaagaaatggatgacaaagattttatcttttcaatctatcctaacgatctgctgtttttcgagcacaataaaggaattaactggtctgtcaaacataaaaacagcacactgccaaatcagaaagaagcaacagaactgttcggctattacataaaagcaggtatagcaacagcaactatttctatcattaaccacgacaactcctatatgctgtcaagtcttggtataaaaaccttaaaatcattgaagaaatttcaaattgatatattgggcaatatttcagaagtaaagcatgaaagaagaacaggattcaatcaacgatccggaggataa

SEQ ID NO: 149 - DNA, 3339 bp, unidentified
  misc_feature 1..3339: note = Synthetic sequence or unknown origin
  source 1..3339: mol_type = other DNA
atgaaatatagaatcggattagatataggaattgcttcgattgggtggagcgtactagaaacggatgaggcaggagagccgataaggattgccgaccttggcgttcgtatctacgacgtgccggaggatccgcaaacgggagattctcttgctgcaccccgtagacaggcaaggtctcttcgcagactaattcggcgaagatctcacagagttgatcgggtaaaaagtcttattagtttgacttttggcgatgaaattgtagccgagcttgagaaaaacaaaccgcttgacatcgtggcgttacgagttaaaggtctagataacgagctgactccttacgagattagtaggctgtgtgtgtattttgttaagcacagaggttttcgctcgtctaaaaaagccggttctaaggataaggacgagggagtgttgcttactgccacgtcggaaaaccgtaaaaaacttatagagggcggataccgtagtataggtgaactgttgtacaaagaatattccggctatacgttgcgtggggatagggtgtatttgtaccgaaacaaggatggaaaatacgataacacttttcttagagaggatttgcttgcagaaataacgcaaatacttgataagcaaatcgaaaaagggataataacacgtgattttgctcaaaaatatgccgagatatttacctctcagcgttcgtttgacgagggcccgggaaagggtagtccatactctggaacctttgcaattggactttgcacctttgagcgcaagaacggttacgagcgcgcgccaaaggcgtcgtatactgcggaatatagtatagctcttcaaaggctgaataatcttatgccagtaagacggggcgaacagcttccgcttaccgtagagcaaagaggggcggttcttgcagaaatagagaagtgtaaagagattaagtttgataagctccgtaaaattcttggttatgataaagatgacagcgtaaggtttaatcttttaagttattccaaggataaaacggttaaggcggtagagggagccgttttcgtaacgatgagaaacagctacgatataagaaaggctctatcctatcacgataatcccacgcccgagcttttggacggcgttgcggagataataagcaagtacaaaagccttgataggcaggaatctgagcttttgaagcttgacggaacgattaccaacgaggagattgaagcgattggaaagcttgacgcaacgaagttcgtgcatttatctctttatgcgcttagaaagattcagccatatttgtacgaggggtataagtacagcgaggcttgtgaaaaagccggatacaatcattccgacttttcgggcgataaacgaaagcttcttaagggtgaggatataaccgagcttataaacgagataggctcgccggtagtccgcagagcgttctcgcaggtaataaaggtaatcaacgcaatcgtgcttaaatacggtaaccccgttggcgttaacgttgaggtcgcgagagagctgtccaagactcttgacgaacgcagaaaaatccaaaaggataacgatagtcgccacgtcgaaaacgaacggctgaaagaaagaattcgtagtgatttcggtgtggaagcaaagggcttggatataattaaactacgcctatacgagcaacaacgcggaaagtgtgcgtattccggcgaaccaatagatataagcgcgttatttcatgatcccacggcgtatcaggttgatcatgtaattccgtactcaagaagctttgacgacagctttaagaacaaggttttggtaaaaacgagtgaaaaccaaaacaagaagaatatgatcccgtacgagtatttcggcttggacgaaaagcgttgggcggaatacgaggcgagagtgggaaccttcgattttccctacgctaagaagcaattattgctcaggaaaagctttacggaggaggacgaatccaattggaaggatcgcaaccttaaggacacgcagtacataagcaggcttgtatataacgttatacaaaactatttgctatttgatgagagcgtgcaagcgaaaaagaaggttcgtgcggttagtggcggaattacttcttatctccgcaagatgtgggggttaaccaaggtaagagaggacggcgacaagcaccacgcgcttgatgcggtggttattgcagtagtaaccgataagtacgttaacaatatttcgcggtataataaaaataaagagctattctttggcgaaaaaggcgtatatatcgactatgaaacgggcgaggttatttcgagggaagagtttgacgcgcgttatggaaagaagcttaatcctccgtacggagaatttgtggatgagcttaaaatccgccttatggacgaatgcgaggaaaccgacctttacggaatggttcacaaggggataaggcaatgttatcttgacaagcttgccgagtttggttataacgaagagcagttaaacgcggtaaagccaatattcgtcagccgtgtgcccaatcgcaaagcaaagggcgctttgcacaaggcaaccgtttattcaaacaagtataataatccggagcacggcaaggttattgtcaaaaagactccgcttaaagacttaaagcttgataaaaacggtgaaattgcgggatatttctcgcttgcaaggcaatcggatcctgcgctttacgaggcgataaaggagcggcttaaagcgtttaataacgacggaaagaaggcgtttgaggcggaattccacaagcccacgaagagtggtgaattgggtcctgtcgtacgctcggtaagaacggaggagaagggctcaataggtcttacgctcgaggcgaaaaagggttacgtaaaaaacgagtcgatggtgcgctctgacgtcttttataaggacggaaagtactatttcgtgccggtatacgtaaaggatatcgctaggggtgttatacctaataaggcaatctcagcaggcaaagattacgaggattgggacgaaatgaaggaagaggactttttgttctcgctttataaaaacgacttgattcttgtaaggatgaaaaacgatatttctctcgtaaaaccacgaacgaaggaaaagtatgccggcaaatcaaaggagatgcttctctattataaaggagtagacagctcaaccggaaacgtttccattatcgttcacgacaatagctacgaggggcgtccgggattaaaaacggcgcttagtataaaaaaatacacggttgacgtgcttggaaacgtaaccgaaataacgaaaaaggagaaaagagatactttaggtaagaaaaaataa

SEQ ID NO: 150 - DNA, 3342 bp, unidentified
  misc_feature 1..3342: note = Synthetic sequence or unknown origin
  source 1..3342: mol_type = other DNA
atgaattacagaattggacttgacattggtatcggatcagttggatgggcagttgtttcatcagaaggagacggacatcctgcaagaattgaagattttggaactagaaaatttaaatctggggaaaatccaaaatccagcgatacgctatgtagtgaacgcagaggttttcgcggaaatcgtagactgactagaagacgttcattcagaaaaaagttgctgctaaatcattttaagaatattggcttgttgaataatactttctatgacgattatgccgattgtaaagatgatgacgtatactgtttgaaagtaaaaggtcttgacgaaaaattattgcctgccgaattgtacaaatgccttgttcacacgtgtaatcacagggggtatagggatttttacgagccggatgatagcgacgaagaggcaggtaaaaacgaaagcgcagctaatgattttgaaaaaatgttcattaagagcgggaaaaggactgtgtcagagtatcttgtatcggatcatgtgtcaaacgggtttgtaaactatagaaatcgtaatggtggagccaatccttatttgcttgtcagaagaaaactgctgcaggaagaagttgctcttttgttgaagaagcaaagcgagttttattcttgtcttgacagcagaaataccaatcagatcataacaataatttttaatcaaagagattttgaagacggacctggaaaccctgatgataaatcacgtcgttattatggatcactcggaaaatgtccgttttattccgtcgaagatcgtggttttagaggcacagtaattgctgacgtttttgctgtaacaaatacattgtcacagtatcgttttgttaataaagaaacgggagaatatgaacttgaacctaaagttgctgaaaaactaatagatcatcttttggctaatgcaaagctttcaatgactgatgtaaaaaagatacttaaagaagaaggttttgaactgttaaagagcgaacgctctgatgataaagcgctcggaaaagcgatcaagtttctttcaatagcaaaaaaatgtgcagaagaagctgaatttgattggaaagagttgattaatgaatatcaatttgacccggaaataccgactgttttgcattcaataggtgaacttatctctaaatatcagacaccaagtcgtcgcagaaaagagatgaaaaaatctggaatagatgaaagactgataaaaactttttcaaacaaaaagataagcggaacggctagtgcaagttataaatatatgtgcgatgcgataaaagcttttttaagtggcgatacatacggaaattatcaggctaatttcaaaaaggtaaacgttgattcggagaataaggagaagagctttaaacttgccccgtccgatatcgacggcgcggatgtccgcaataaccgtgtcgttttcaaggcgataaatgaaacgagaaaaatcgtaaatgcgataattgatgtttatggttctcctgaggatatagttattgaagtagcaagcgaactcggggaaagctttgaaatgagagctagggaaacaaaaagacaaagagaaaacgaaaaatccaacgataagattaaaagtgaaatagcgtctcttctgtcaatagatattggtgacgttaaaggagcaatgatcgaacgttacaaactttataaagagcaggaagggaagtgcgcatattctgtacgacctcttggtgatataaaagaggttgttgaaaacagaaatcatgcttatgaaattgatcatatcgttccatactcattgattcttgacaatactctcaataacaaagcccttgtatatactgaagaaaaccaaaagaaagggcaaagaacacctcttatgtatatgaatgaggaaaaaagtcaagagttcctgtcatttgtaaatcatatgttttcacgaaaaacagattcgattggaaggaaaaaatttgagtattacaggcttgaaactatatacggtgaaaaatccgaagagattctttcagcctggaaatccagaaacataaatgatacaaggtatataacaaaatatatcgccgggctatttgaaaggaagcttcttttctccggagaaaagaagcagcacgtatttacagtcaaaggtgctgtgacacaaaaattccgtcgcgaatggtttaaagacagcgcttggggagaatatgagaaaaaacgtgacacatatcttaatcacgctcttgacgcgcttattgctgcaaatctgacgaaaccatatattgaaataggttcagatgcacttagacttatatcaatctataagtctcacaagagccggatcactcctgagtatgatgagtatctagaaaagtgtattgcaaaaatgagagagtattatggtttcaacgatgaatacaccagaaagctcttatcaagaacaggcagggctccttcttttgtaccacgtctcgttgatgaagtgagggtgcgtttctatgatgaagacgaaaaagtgtttaacgaaaatgtagaaaaattgtacggaaacgaagcaggattcatcgttccgcctcatatgccaataacctcccataaacaggagaaaaaatataaaggcaaaatcgcagatgaaaatcctttaaagatcgttgagattgacggtttgccgcacaaaatcaagcggatagatatcaagtccgtttcggaaaaaactctttcaaaagtatataccgaagacaagtcattgatcgggcagttgacgacgattcttaaaggcaagggcgaaaaatacactattgcagattatctgaaagataactctgaggaatattttgtttcaaaagaaggaactttgatacgcaagatttcaaccgatggcggtgttgtttccaacttctacagaaaggagatagaaaacgggaactatacatatctcggaatgttgaaatattattgcgttgaagtttacaaagacagcaaagggaacactaaaacctgcggcgttcgtttcgttgatattgttaacaggaacggtaagctttatcgaaaagaagagagtttgccgggtgattattcaaagcatgtgatgtatttatttgctaacgattacgtcacgatttttgatgggaaaggggaaacgaagttttcagggtattatatttctgttgagaatatcaatagctcaaagtttagttttaaattaaaaaactattcatcaaatgttataaaatctatttcccgagaagatacaataaaaaagttcagtatttcattgcttggaaaaatcggaggagagattaaatgttccgaaccgttaccgtgtataaaggagagagaatatcggtaa

SEQ ID NO: 151 - DNA, 3363 bp, unidentified
  misc_feature 1..3363: note = Synthetic sequence or unknown origin
  source 1..3363: mol_type = other DNA
atgaaatacagattggcgctagatataggcattgcctcagttgggtgggctgttttagaacatgatgaaaatgacaatccatgcaggattgcagattttggagtgagaacttttgaagcggcggaaaatccaaaggatggttcatcaccagcggttgatagaagagcggcgcggggattgagaagaacggttcgcagaaaaagagcaaggcttgataaaatgaaaaaagttttgtcgcaaacattattagatggcgcgtctattgatttttcgccatgcgacatttatgaacttagggctattgcgcttgacaggttaattgaaaacaaccaacttgcacgaataatttattcaatggctaagcacagagggtttaaatcaattaaaaaggcagaggagtctggcaaagaggcctctaaacttcttggcgcaatttctgcgaatagtgacaacattaagaattatcgttcaattggcgaaatgtttttaaaggatgcaaaatattttgaagaaagaaccaaaactgagaatggcaaaataatttcgtacagggtgtataatataagaaaccatgctgacgactttaaaaacactttggcaagagcagatgttttaaatgaattgaaacaaattttgttgtcacaacaaaaacttggaaataaaaaaataacacctgatttcataaaccaggttatcgatattttcagcctgcaacgctcgtatgatgatggcccaaatgcgccatctccatttttggttaattttaaagttggagattgcacatttttcccaagggaaaagagggcaccaaagggctcgctgagttatgaatattacacaatgcttacaacaatcaaccatcttcgcatcaatggcctgtcgctgactgatcaacagcgaaaaattttgattgatgaatttttaaaaaacaaagagataaaagttgaaaaagttaaaaaattgttaaaacttactgataatgacactttcactggcaacagtaagtgtgatgataataaaaaagtgcttcttaaaaggatgttttcatatgacgccatgaaagcgttgggtcttgaagacaacccgcttttgcatgttgacttactggatgaacttgctctaattttttcgctttacaaatccgatgatagaaggaaaatgcaacttgggaaaagcgaattgacaaaaaacttaacatacagccagattgatgaattattaaaactagacataaataaatttggaaacctgtctatcaaggcaataaaaattctcattccgtatttagaagcagggatgatttacagtgatgcctgtgccgcagcagggctaaaattgccagaaggcgaaaaatccgtgaagttgaaatacaatcagttgccagaaattcaggatttaacttcaccggtggcaagaagagcggtggcacaatctttgaaagttatcaacgccgtgatagataaatttggctcgccttgtgcagtgtttgttgaacttgcaagagatatgagtaaaacttttgaagagcgccatcgaattgaaagagaacaaaaagaaaattatgcaaacaatgaaaaattaaaagcgcgcttagtaaatgagtttggaattttaaacccaagcggtaaggatattttgcgtttaaagttgtatgagcagcaaaaaggcaaagatatttatacaggcaaaagttttcaagatgttttaggcttggttaaagcaatctttaatgataacaacacgcagattgaccatgttttgccatttagtcgttgttatgatgatagttataacaacaaggtgctggtattggcagaggaaaatcaagccaaaggaaatcgcactccgtttgaatattttggcagcgatgaaaagcggtggacggactatgttgaaagagttgaggcgttatttccagatgataaatctaaaaaaggcaaaaagaatcctaaaaaagtaagattgttaaacacatctttgcaggaagatggagcagaacttgcaagccgagcattaaatgacacaaaatatgctgcaaagttgataaaatcattgattgaagaccatttaatttttcaagaaagcagcatgaagaaaaggcctgttcgttgcgtcaacggctctatgacaagtttccttagaaaaatttggggcattagcaaagagaggtttaaagacgacacccaccatgcggtggatgcctgtatcgttggctgtgttgggaatggcttattgcaaaaggttacaaagtatttgcagtttgaaagttacaaaaaacttcctgatggaagatatgtggataaatccacgggcgaaatagtgccagaagaaattgtaaaagagtttgagcaaaagaattttaaatttccatatccaacatttaaagatgagttaaatttaagattgagcatagttgaaaatcctaaatattatcaaaaagagtttgaaatgcttggatattcacaagaggagattgatgctgttaggcctttacatgtcagcagaagcgtaaataaaaaggcggacggtgcaattcataaagagacggtttacagcaaaaaattgttaaatccagaggaagataaatattttgttacaaagaaaacctcaattaaatcattaaagtatgataaggataaggatgaaattaaggacttcccagaagaatataaaaaagcagaccctaaactatatcaaactttgttgcaaaggctgagagaatttaatggtgatgcagcgaaagcgtttgcggagccaatctataaaccatcaaaaccagggaactcaccaaatcaaattaaaacagtgaaattgcaagcgaaaatcagcgattgggttgatgttcgaaaaggcgtggccgtcaatgacagtatgattagaatagatgtctttgagaaaaaaggtaagttttactttattcctgtgtatgtcaaagatatgtatgctaaaaaactgccaaacaaaatttggaaaagcacttcatataaagattggccggagcttgatgagtcgtattcgtttaaatttagcctatataaaaatgatttaataaaaataaagtcaaaagagggctttaaatttacacccaccgataaaaaggctgaaaaaatcaccacaatagagaacgatatgtttgtatattatcaaggagcggacagatcaggaggaaaaatttcagtggaaattttaaatggcgggaaacaaagcaggactgggattcaaactcttttaacttttgaaaaatatgaaattgatgttttagggaatataaccaaagcaaaaccagaaaaacgcaaggagtttaacaatgtcattcataaatatcctcgtatcaagccaagcgcatctgtcagtcaaaaataa

SEQ ID NO: 152 - DNA, 3384 bp, unidentified
  misc_feature 1..3384: note = Synthetic sequence or unknown origin
  source 1..3384: mol_type = other DNA
atggaaaactatcagtatcgtattggattggatatcggtattgcatcagtgggatgggcggtacttgaaaccaatgcacagggagaacccaaaagaatagcagatttaggggttcgtatttttaccaaggcagaacatccgaaggatgggtccagtctagcggcacctagaaggtctgctcgctcagttcgaagaagacttagacgaagaaagtttaggatacaacgtgtcaagggtttgtttgagagagaaggtttaattaccaaacaggaattggaaaaatcattccagacaaacgcagtggaaaacgtatatgaactacgagcgaaagcattagatcgaagaatcacaaacgaagaattggcacatgtgcttttacatatagcaaagcacagaggatttaagtcaaatcgtaaagcggaagcaaaagacaatgaaaccggtgctgtattgtctgccataagagaaaatgagcaacgattattggaaggtaactatagaactgtaggtgaaatgattgccaaagatgaatcgtttagggaagatgcaccgtggaacgagaatcactatatttttacaccaagaaataaagcggggaattataagcatactgttctgagagacatgctggtgaaggaagtacattgtatttttgaggcacagcgtagcttcggaaacgatgctgcatctgaaaaactggagaatgattttatagatgtctttaccgcgcaaaggtcttttgatatgggaccaggtggtgaaagcccatatggtggaaacataattgaacgaatgcttggcaaatgtacttttgaaaaaaatgagccaagagcaccaaagggaagctatactgcagaacggtttgtgattcttccgaaaatcaataacctacgaattaaagatagtgctggttcagaacgcggactaactgaagaggaaagaaaacttcttttggctgaatcttataagtcaaaggaactaaagtatacaaaggttagaaagattcttgcattaagggatgatgaatactttaaaggtctgaattatggtcgtaaagaggtggcagatgtagaaaaggctacctttgtaaaagcgactgctacacttacaattactaaaattctcgaggcaaacggagaatatgatttctcagatttggcggatggactagatgagaaacgtgcatttcttgttgatgaaatagcacgattaattgcaacgtataaagaagatgccaagagacgagaagaatttgaacaatttgacttggatgatgaaacagtggataaattgttggaattaaatgatagtaaattccaacatttatcttttgttgctatgcaaaaactgatgccatacttagaagaaggttatacttataacgaagcctgcgagagagttggttatgattttaaggatgagtatcatggggagaaattccatacacttagaggcaacgagtttcaaactatctaccaagaagaactcgcggatattacaagtcctgtggtaaaaagggccatttcgcagactattaaagtggtaaatgcaatcatcgataaatacggaagcccacaggcaattaacgtggagctggccagggagatgtccagaccatttaatgagagaagcaaaatggaaaaggatatgctggctaatcaagcaaataatgaggcaattttgaagcgacttcgtgaggaatatggtgtggcgcatcctaccggtcaggatattattcgatttaggttatggcaggaccaggatggaagatgcttgtattctggagaggcgattcctattgatagattgtttgctgttggagaaacggatatagatcatattattccatatagtatttcttttgatgatagattatccaacaaggtattggttaaagctaaatgcaatagagaaaagggtaatcggttgccatacgagtaccttggaaataatcctgctgaatgggaggcttttaaatcaagagtagacacatacgtaaaagatagccgtaagcgcaacaatttgaaaaaagaaaaactgacagaagaggatcgaaaaggctttaaagaaagaaatctgactgatacgaaatttgctactgttgtagtcacaagactgcttcgtaattacctggaaatggcaccgatagagggaaaacataagcatgttacggcagtaaacggtagtgtgacagcttttctgcgtaagagatggggattgtctcaaaaagatagaagaactgatacacatcatgcaagagatgcagttgtcatagcagcttgcacagacggcatgattcaaaagataacgagattctcacaacttcaggagttgaagcacactagagatagaagaattatagatccggataccggtgaggaactgacctttgatgagaagtatgagcaggagtggctcaatatgtatggtaagcatctgcctactccttggccagagtttagggaagaattagagttacgtatgatgcctcatccagaggatgttgtgttagatgaccctcggaaattcaatcagataatcggttataaagacgacctgtggggcaaaccttatgaacagcctatctttgtgtccagaatgccaaatcataaaactactggtgctggacatgctgagacaattcgcagtgctagactatttgattcagaaggtgtggtaattgcaaagacagcacttcaagatttgaaacttgataaagaaggtcagattgatgggtactacaacaaggaaagtgatagattgctttatgacgcgcttttaagaagactgcaaatgtatagcggagatgcgaaaaaggcattccctgagggagaggattttcataagcctactagtacaggagaagagggacctgttgttaagaaggtgaagataatgaagaaacagacagcgggtgtatctgtaggtaaaggtggtattgctgaaaatggcggcatgattcgcgtggatgtatttcaggtgaataaaaaatattattttgttccagtttactatgcagatgcggttgcaaagagattacctaataaagcgtgtgtggcactaaaacctaaaagtgaatggaaagaaatggaagatcagttctttgttttcagtttgtttccaggagatttattcttctttaagcataaaaaaggaatgaaaatcaaatactatgataaatcgatgggaagtgtaagtgaagcattgtgttactttactggcgccaatacacatactgcttcatttgcaggtgattcaaatgataaagtattctcatttgagggaatgggcattcaaagcctagaagcacttgaaaagtaccaggttgatgtgttaggtaatatcaaaaaggttgagaaagaaacacgtatgacattccgttaa

SEQ ID NO: 153 - DNA, 3396 bp, unidentified
  misc_feature 1..3396: note = Synthetic sequence or unknown origin
  source 1..3396: mol_type = other DNA
atggcacaaaaatcttcatattcaccaaaaaaatattcgcttgggctagatatcggcacctcgtcagtcggctgggcgatactggacttggataaggagcgtattcatgatttgggggtgaggatttttgagcggccagaagacccgcaaaacggcgattcactcgccaaacctcgccgtgacgcccgttcagctcgccgccgtctaaaacgtcgtcgccagcgcctaaaccacctaaagcaattttttgtcgaccaaaacatcctcaccaaagatcaagttgaagaagttctaaattacaagtctgatttcaacaaattagacgtgtatgatctgcgagcaaaagctctcaccgaggagctatcacccgaagaattgctcaaagttttgtatcaaattaccaaacgacgcggctttaaatcaaaccgcaaggtcgtagaagagtcagacaaagaaggtggtcgtgtcactagcgccctcaaaactaacgagaaattcctcgccgacaacaattatacgaccgtcggcgaagcgctaagtcgtgatgaaaaatttgcaccacacaagcgcaataaacgcgatgactataccaacagttttgcgcgcgacgactttttgcacgaactagaggccattattaaaactcagcgaaactacgccctgaaaaatgtccccgaaccagctattaatgaattgatttacggcattgacgatggacaagtcaccaacgtcagcgccataatgtaccaacgtccatttatgaccaaagaactaatcgaaaagatggtcggcaaatgtacttttgaagacggcgagaagagagcaccaaaagccagctatagtttcgaggtatttcgcctggcaagcgatttatcacacctcgttttcattcctcgtgatgccagcaaacgccaggctaagcgcgagaatctagaagtaaggctatctccggaacaaattaaacaagttattgagcttgccaaaagtcaaaaaagtttaacgtataaaaaagtgcgcagcacggcaggaattagcgaagactacgtaccaaaagatgtgcgcggcaagaagaaagatggtgatgaattcggcgaggaaaacgtcttcggtgggctcaaagcctacaatgacattaggcttgcgctaaaagatctaccagaagattgggcaaaaattgataatgaatcagcaatcaaccaaatcgcctataccctcactacacaaaaagccgatgaaggtattcgcgccgagctagacacactgccactttctaacaaagccaaagaagctatcgtcaaaattaagccaaccaatttcagagcattcgggcatctatcaatcaaggctttgcaaaaaatcacgccgcacattcttgagggtatgacttacgacaaagcctgcgaggcggctggctatgacttcaaaaagcaatctgccagcctagagcaaattaccaaccctgtcgtcaaacgcgccatcacacagaccctgaaggtcgttcgcgccattgaacgcaaatatggcaaaccatatttcatcaaagttgaaactgctcgcgacttagcgaaaaacttcaaagatcgtaaagcaattgaaaatgagaataaagaaaatcaaacgcgcaatcaaagtatcattcagacgctaaacgagaacggcatcgtcactccaaccggtcagcaaataattaaagtcaagctctatcgcgagcaaaacggcgtttgcttatactctggcaaagcgattgattttgaaacaatgttatgcgacgacaacgcttatcaagtcgatcacatcgtgcctttttcacgctccaacaacgatggaataaccaacaaagttctggtattaacagaggaaaatcaaaagaagggcaatcaaacgccatttgaatattttggcgcagacgaaaaacgctggaaagagtttgctgctcgagtagagtcgacatacaaaacacgtgatatcaaaacagccgataaagcaacgaacgccatcaattacaaatacaacggctacgccctgaaaaagaagcaaaacttattgcttcaagattacaaaaacgacagttggaatgtgcgtgctctgaatgatacacgatatatcacgcggtttatccaaaattacttacgccaaatggttgactttgccgaaggcgaagaaaaacagcgtgtaatcgcgccaaacggcacgacaacagcatatctacgcaaacgctggggactagcaaaggatcgcgccgaggatgtattacaccatgccaaagacgcagcagttgtggcagcaattgataacagcatagtaaggcaagcgaatttattcgcgaaacgcggggagatagccgccctactatcagctgtaaaaacgatggaagaaaagaccgacaagctgactggagagattgtcgatgaggacgagtttgacagggcccagcgacgtaaggacgcggcgatcgtactatcctcgaagcactttccacaaccatggaatgatttcggtaaagaggtcatgaaacgtaccctcaataccgatatcgccacactacaaaatgaactacgcggacttgataattacgatgaagatttccgcctgagcgtaaaaccgatcttcgtctcaagagagattagacacaaaatacgaggagaagcacatgagtcaaaattgcgatctaaccgaaatcgtaacggacaaaacatcatacgaattccactaactgagctaactctacaaagactagaaaattctcttgtaaaagaagagtttgatagtcagaaaaatagcaatggatctagtttatacgaaaaactactagctcgacttaatgagtgtaacggagattcaaaaaaggcttttaatcctccatttaagctgtacaaaggtccaaaacaggacaaaaatggtaatcccatttcacctgtagccgcagttaaagtctatgacaagaagggcgtggtttctgttggccgtaaggcaaatgcgccagtcgcccttgctgagatggttcgtattcgcgtatataaaaaagataaccaaatatatatgatacccgactatcgcataaacatactagaaaataaagagacaatggaactcctaaaaccgttaaagaaagtatcaaaaatcgacaatagttttaactttatcggttatttgtacaagggcgatctaataacaatacaaaaagacagtcaaacttttattgggtattttgttcaatttgaaggcgacaatcgcataacaatcaagaaccacttagccgtagacagctctagggattcaaaatctacagtaaaacgagaatcgctgtctggcattaattatctaaagatacataaagtagatgtgttaggagacgtgaattttagcgagggtattgtatggcctggcgcgtcgtag

SEQ ID NO: 154 - DNA, 3399 bp, unidentified
  misc_feature 1..3399: note = Synthetic sequence or unknown origin
  source 1..3399: mol_type = other DNA
atgcagatatatgtctttaaggacattccttatagtggtaaattatatacagataaaccagaaacaaaatatactttggaggaaatgaaaatgggggtaagatttggattagacataggggtagcttctgtgggatgggctgttgtaaatgacaattacgaagttgaagaagcaggttcaaacttatttacatcagcagatgcaaaccagaacgttgaacgcaggtcattccggcaaacaagacgcctgcacagaagacggggaaaccgtattaatgattttaaaaaactttggctgaatacagggcttccaattcctgctacaaacattcctgatatgctggaattacgtaacagaggattaaatggcaggttatcagaagaagaaatgttccacgtattaaaaaatgagttactacaccgcggaatttcatatcttgatgatgcaacagatggttctgaaaccgcacaaggcgactatgcaaaaggaataagccagaaccagaaagaactggacagtggcaaatttccttgtgaaatacagtcagaacgtctggacaaatatggcaaataccatggcaatatttctgttggcaatggagaagaaaaaattattttatccaatgtctttacaacaggcgcatataagaaagaaatccttgctatactggagcagcagaaaaaattccttggatttctgacagacagcttctgtgaaaaatacatagaaatatttttaagaaaacgtgaatattatactggcccaggcaatgaaaaatcacgtaccgattatggcaaatatactaccaggactgatgaaacaggaaaatatataacagaagataatatatttgaaaaacttataggaaaatgcagcgtatacaagcatctgacacgtgcagcaggtgcaacatatacagcacaagaatttaatttattaaatgaccttaataatataactgttaatggaagaaaactatcaaaggatgaaaaagaagttataattaatgaagtaaaaaatgccaattcatttaatatgagaaaaatattaaaaaaagccattggtgaagatatagaaacgttaacaggggcaaggcttgataaaaacgaaaaagaagatttccataaatttgcacaatataacgcaataagaaaagaatttgaaaaaaatggatgggatataaccgttctttccagggaagaacttgacagcataggaaatgtattaaccttgaacacagaaaaagaagctatattaaacggctttaaacgtgaagggctgtcacttacagaagaaatggaaaactgccttatatccttgcgcaaacaaaaaagccctttatttagcaaatggcagtcattctcattagatattatgcttgaactgattccaggtctttatgaacagccaaaaaaccagatggaactgcttacagacatgggaatattcaaaagtaacaaagatatatttaaaaattacagcagtattccagcaaatgcaatacttgaaaatatatacaaccctgtagtaacacgctctatacgcataacaatacaaataataaatgctttaataaaaaaatatggatatccagaccagataattatagaaatgccacgtgacaaaaacgaagaagaagagaaaaaaaatattgctgaaagacaaaaaaagaaccagaaagaattagacggcattattaaaaagatttcttctgaatatggaattaaaataacagaacaggatttccaccagcataaaaaacttgtattaaaactaaaactctggaatgaacaaggcggaaaatgcccatattcaggcaggacaataaatatacaggatttattatacaacccttcactttttgaggttgaccatataataccaaaatccatttcatttgacgacagccgttcaaacaaagtgcttgtgtatagtacagaaaaccagaaaaaaggtaataccaccccatataactatttaaggcatttaagcggcaactggggatataaagaatactttgattatgtatgcaggcttagaaaagacaatatgataaacaagcgcaaaatggaaaacttattatttacagaagatataaacaaaattgaagtattaaaaggatttataacaagaaatattaatgatacacgatatgcctcaagaatggtattaaatacattacaaggatatttccaggcaaaagaagcaccaacaaaaatcaaagtagtacgtggaagttttacacaccagttccgcaataacttatacctggaaaaaaacagggatgaaagttattcacaccatgcggtagatgccatgattatgtgctactcacaaatgggatttgatgaataccataaactgcgctcagaaataatagattttgaaactggggaaatccttgatatcaaaaggtgggaagaagaagtaaatgagaaaacttacaatgaacttatataccagaacaaaatgatacaaatacgtgccaatatacaaaaggcagaaaaaaaagtaaaattctggcataaacgtgattccaaacctaacaggggactatgtaaccagacaatacgtggaacgcgtaatgataatggtgtaattaaaaaagtaaacaaattaaacatatatgacccatctggtgtagaaacactgaaaaaaatgattaacaacggtaaacaagattgctttttaatgtataaacatgacaaaaggacatgggaaaatatgttgcagattatggaggactacagggaaaccaaaaatccatttacagaatatgaaaatgaaacaggagattatttaagaaaatactccaaaaaacacaatggcccacgtatagtaaaattaaaatatcttgacggggaagttggaagctgtatagatatctcacataaatatggatttgaaactggaagcaggaaagttatactcgaaagtttaaaaccataccgtatggatgtttactacaacgaaaaagaccaaaaatattatttaattggggtaaaatattcagacttaaaatttaacaaaggaacatatattattaatgaagctgcttacaataaaacactagtatctgagaaattaattaaaccgggacagacaataagtgatttagaaagactgggatataagtttatgctttcattctataaaaatgaaataatagaatatgaaaaagatggggaatattatacagagcgtttcctttcaagaacaatgccaaaagcaagaaattatattgagaccaaaccattagatgcaccaaaatttcagaaaccacaaaaacaaattggtctttcaaaaactacttctataaaaaaagtccgccttgatatacttggcaacagatactattctggacaggaaaatttcaaattaactgttgacataaactaa

SEQ ID NO: 155 - DNA, 3411 bp, unidentified
  misc_feature 1..3411: note = Synthetic sequence or unknown origin
  source 1..3411: mol_type = other DNA
atggatgaaaaattggattacagaatagggttagatattggaatcgcttcagtggggtgggcggttttacaaaacaatagtgatgacgaaccggttcatattgtggatttgggtgtccgcatttttgataaggcagagataccaaagacaggggaatctttggcaggaccacgcagggcggcgagaagtaccagaagacgtctccgcaggagaaaacatagattagaccgcatcaagtatctgttatcagaagaggggattattgatattgaagcatttatggcacgttatcactctgaaaacctgcctgatgtatatcagcttcgttatgaggcattagacagaaaattaagcgatgatgaatttgcacaggtgctgatacatattgcaaaacatcgtggcttccgctccacaagaaaagcggagactgctgcgaaagaaaatggcgcggtgttggcaagtacgagcaaaaatcaggcattgatgcaggaacatcattaccgtacagtcggagaaatgatgtatttagacgagtcatttcggattaactgcccatgggtagaaagtggatatgtgctggcaccgagaaacaaagcagaagattaccgccacacgattctccgttccatgctggtggatgaagtacatgccatttttgaggcacagaggacacttggaaatacgaaggcttccccgcagttagaagaaaaataccttacaatcatggaaagccagcgttcctttgatatgggaccgggattgcagccggatggtactccaagtccttatgcgatggagggatttgcagaccgggtaggaaaatgcactttggaaaaagaagaaatgcgtgcgcctaaggctgcttatacggcagaatattttgtggcattacagaaaatcaatcatacacgcctgatagatgcaaatggagaggtgcgcaattttacggctgaggaaagagaatgcctgattgatatgttacatcatcagcgtgaaatcaaatatgcagcggcaaggaaagcattaaaactggatacgaatatccgttttcaaaatctgaactatcgtgggaaaaagaatgatgatgcagcagataagatggcggaaactgaaaaagcaaagtttattggtatgcctaattatcatgactataagaaataccttgcaaacagacttcatgaaatcccagaaccgacagagcaggagctgttagatgagataggacggattttaacctgctataaaaatgatgatacccgtttgaaatatttggcagagcttggattgacggcagaagagatggattcgctattggcatttacaccggcgaaattccaacatttatccattaaggctatgagaaaaatcatcccttatttggaagagggatatacctatgacaaagcgtgccaagaagcaggctatgattttaaggctgatggcaatggaacgaaaaataaactgctcaagggtgacgcagtaaatgaaatcatcaatgagattaccaatccggttgtaaagcgttctgtgtcacagacagtaaaggtaatcaatgcaatcattcagaggtatggaagcccgcaggcaatcaatattgaacttgctagagagatggcaaagacatttgatgagcgcagaaagttagaaaaagatatgcaagagcgccagagctctaatgataaagtaaaggaaagaatcaaagaattaggcgttatttctcctacgggacaggatattttaaaataccgtctctgggaagaacagggcggacgctgtatgtattccggcaaagtgattcctatcgcagaattgttcgacagggcaggcggatacgatattgaccatattttgccatacagcatcacatttgatgacagctaccgcaataaagtattggttactgcacaggagaaccgccagaaaggcaaccgcacaccttatgaatatatgtgtgaggatgaagaacgcctgaaggagtttgaagtccgcgtcaggacgacaatacgtgattaccggaaacaggaaaaatttttaaaaaggcattttacggaggaggaaaaaaaggaatttaaggagcgcaatctaaacgatacaaaatatattacaaccgtagtttataatatgattcgtcagaatctggaactggcaccgttcaataaaccgggaaagaaaaaacaggttcgggcggttaacggagcaattacttcctaccttagaaaacgctggggcatgccgcaaaaaaatcgtgagacggatacacatcatgcgatggatgcggttgtcattgcctgctgtacagatggtatgattcaaaagatatcacgctatatgaaagggcgggaattgaaatatgcgcgtggctatgagtattatgatgaagagacaggagaaattttcagccccggagagatgtcaagagatgagtgggataaggaatttggagtccggattccgttgccatggccgacgttcaaaacggaattagaaatccggatgggagaagaagatccccttaattttctcaatacccatacagatgtcaggacagagatagattatccggcttggatgtatggcagcgaagatggaaaagaaaaaccggtcatccgtcagatttttgtgtcgcggatgccgaaccataaagtgacaggtgcagcgcatgcagatacgattcgcagtccacgacactttgcggacgacggcattgtattgacaagaacagccttaacagatcttaaattaaacaaagacggagagattgagggatactacaataaggaaagtgaccggctgctttatcaggcattgaaacatcagttagaactgtatggcggagatgcaaagaaagcatttgcgcaggatttccataagccaaaggcagacggcagtgagggaccggttgttcggaaggtgcggattcaaaagaaactttccatgggcgtttctgtcaatggtggaaacggaattgcagaaaatgacggtatggtgcggattgatgtgttctgtgagaacggaaaatattactttgtaccgatttatacggcagatgtggtaaagaaaaaactgcccaatcgggcagcaacgcataccaaaccttatagtcagtggcggatagtggatgataaggattttgtgtttagcctgtattccagagatttgatacatgtgaaaagcaaaaagggaatcaaggtaaatttggttgacaacagccagatattaaaaaatgagatatatgcatattatacggcagctgatatttcaacagcaagtattgtcggaattggtcatgacagtggttttaaatttcgtggattgggtatacaaggattggaagtgttagaaaagtgccaagtggatgtgctgggtcatatttctgtggtaaagcaggaaaaacggatgggattttcgtga

SEQ ID NO: 156 - DNA, 3411 bp, unidentified
  misc_feature 1..3411: note = Synthetic sequence or unknown origin
  source 1..3411: mol_type = other DNA
atgtcaaaattttatagaattggtttagatattggtattggtagtgttggttatgcagttattgaaaatgacccagtaacagaagaaccttgcaggataatgaaacttggagttagaacttttagtcctaatgaagttgataaaactggcgaaagcacagcgaaaaacagaagagaaaacagaggtattcgcagaagaaaaagaagaaaagcttttagatttgaaagaacgagaaatctaatttcaaaaacttttggcaagcaaatttttgatgaacttaacttgctttgcttgggagataaagaaaaaggaatatcaccggctgatgtttatagacttagagcaaaggcattggatgaaaaactttctgatgccgagctttgcagagtaattttgcatttgcttaaaaggcgtggttttaaaagtaatagaaaaagtcaaagttcaaataaagatgatggcttgcttttgaaagccactggcgaaaacagaaagaggatggaagacaatggttacagaaccattggcgaaatgctttatcttgacccaaaatttaaaagggaagttgctggaaaaactttttatgatataagaaatcatggtggagattattcaaattgtttttttagagaagatttatcaaacgaacttgatttgattttaaaaactcaaagagaacttggtaatgaaaaagtaacagaagagtttgaaagtaaaattttggaaatctttaattctcaaagaaattttgatgagggtcctggcaaagaaagtccatataaagcaaattttgaagttggcaactgcacttttattcctactgaaaagagagcaccaaaagcctcttacacttttgaactttttaatgcactttcaaaaatcaataacttaaaagtaaatgatacagtgctttctgatgaacagagaaatgcaatttataacaaaataaaggagcaaaaagaattaaaatttgaagatataagaaaaatgtttaaattttcaggctctgaaatttttaatctatgcagttataaattgaaaaaagaagataatgatttgccacaagatgagtatatacaaaaatgtgaaaacaaagtttttatctcaatgaaaaacagttatgagattaaaaagaaactcaaacttgaaagttcttacgagagcagagatattattgatgaagttgcaaatattttgtcttattcaaaaagtgattcaaagattgataatgcaatagcaaatagcgaaattttgaaaaatttaaccgatgagcaaaagcaggcaatcaaagaaatgaattttgacaagtttggctcactttcatataaggctatgaaaatgatagaaccatttttgcttcaaggtcaaagatatgatgttgcttgccaaagtaccggcttcaaccatagcagttttgagcatgaaaaaatgaaatatttgaagggcaaagaaattgatgaaagacttgccgatataacaaataatgttgtcaaaaggtcagtaaatcaaactttgagaattgttaatcaaattataaaaacctatggctcgcctgagtttatttcaatagaacttgctagggaacttgggaaaaatcatcaagatagagacaaaataaataaacaaataaaagaaagaaccgaagcaaatgatgattttgcaaataagttgactgaaaaatttcatattgtgaagccaaccggtcaagatattttgaagtataaactttatgaagaacaatgtggaaagtgtatgtatagtggacatcccattgatgaaactaggttgtttgagccaaattatgttcaaattgaccatattttgccaataagcaaaagtttaaatgacagttacaacaacaaagttttagttattgctgaccaaaatcaaaataagggcgataaaactccttatgaattttttggcagtgatgaagaaagatggaataattttgttgctagagttatgctcttgaaaaatagagaaaaacaaagaaatttactcaaaaagacaattactgaagatgattcaaaagaattcatttcaagaaatttgaacgacacaagatatatgtcaaaattgcttttaggtatttttgaagattatttgcaaatggcaccagtaaagcaaaatggaaaagcaaaaagaaaagttgtttatagtgttaatggtgcaataacaagttatttgagaaaatgttggcgacttgcaaaaattcgtgatgacggcgatattcatcacgcagttgatgcttcacttattgcaatggttgatgactccataactcaaaaaataactagatttaacaaatttaaagagacatttgcgttttctgatggaaagtttataaacaaaaccactggcgaagttatgacaaaagatgaaatgcttgaatataaaacagagcaagttcaagaatttggcaaaactctagctgaaccttatccaaattttgttaatgaacttaaaattagaagtactgtaaaatatgattcttttgaattttcaaacgaagagaaacaagaacttttgaaacttggttatagtgatgaagaaatggaatcagcaaaaccggtttttgttagccgaatgaaaaccgtgaagaaaacgggcgcaattcatcaagaaacaatgatgagcacaagagaatatgaagaaacgggaaaccttataaaaactgttccgataagcagtttaaaactgaagtcaaagattgaatcagtaaaacttaaagatgataaatatcctgagttttcaatagaaaattattacagaccagaggatgatagacttttgtatttaaagcttaaagaaattttgcacgataatccagatggacttaaaaaaggaaatgttcacaaaccaagaaaagatggttctgatggccctcttgttagaagtgttaagcaatattacaaggcatccaagccggttataacaaaaaatggtggagctttaaatggttcaatgtttagagttgatgtttttgaaaaagacaaaaagttctacctttgtccagtttatatgtcagatgtttatgcacataaattgccaaataaggtgattgaaattggaaaagattggacaacaatagataaatcatttaattttaaatttagtttatatcaaaatgacttggtcaaaataacaagcaaaaaagatattgttttgaaaaagacttttgataatccaaaatctaaaaaaccagatagcataaatggaaaagaaatgctggtttattataattcaactggaatagctgttgcttctataaaaatacaatcacatgataattgttacaaacaagagagtttaggagtaaaaactctacttaatatggaaaaatattatgttgatattatgggaaatgtttacaaagctccagaaaatgaaaaaagagagaagatttaa

SEQ ID NO: 157 - DNA, 3438 bp, unidentified
  misc_feature 1..3438: note = Synthetic sequence or unknown origin
  source 1..3438: mol_type = other DNA
atggataaattatatagaattggttttgatattggtgtaggaagtgttgggtatgctgttttagaaaatgacccagttacagaagacccaattaaaattttaaaattaggcgttagaacatttagtcctaatgaggtgaaagatactggtgcaagtactgcgactgctagaagagaaaagcgtggtgttcgtaggcgtgcaagaagaaaaaaacttagaatgcaaaaattaaaagtattaatttcaagtcaacttcaaatagatgttaatcaaatgcaaaataatttgattaataaagatgtttatgagcttcgagccaaagcacttgatgaaaaaatttcaaatgatgagttagctaaaattattttaaatatagcaaaatatcgtgggtttaaaagcaatagaaaaagtagtaaagcatctggtgatgatggaaaacttttaaaagccattgaaaaaaataataagtttattaaagataatggttataggacttggggcgaagcagtttataaagataaaaatttcaaaattactgtggctggtaatgatttttataatgttagaaatcacggtggtgattataaaaattgtgtccaaagaagtgatttagaagaagaacttagattaattttaaagaagcaacaagagtttaataatttaattactgatgattttattgaattaataatcttagttttttcaagacaaagaaactttgatataggtccaggtaagcaaagtccttactttaaggaaaatggttttgctgatgatgttggctattgtactttctatgaagaagagcaaagggcgccaaaggcttcgtttacttttgaatattttaatgctttgtcaaaaattaatagtttgaaaattggtagcgagtttttatcattagagcagaaacaaaaattatatgaagaatttaagataaaaaaagagctttcttttgcacaaattcgtaaaatgtttaattttgatgatgaaaaatcatttaatctttgcaggtataaaacattaagtaaaaaggaaagagaaggtttaaatcaagaagagattgtcaataaaaataaagaattattttttgatagtgaaaagaaacaaaaacttgctagtatggagcatagctacgatattaaaaaagcattagggtatgagtcttcttatgataatagagagcttattgatgaaattgcatatatgctttcagtttataagagcgaagaaagaattgatgcttatttaaaaagtaatgataaagggctatttactttattaaatgaagaacaggtttcaaaaataaaagaattaaaatttgataagtttgcaagtttatcacttaaagctatgaacgaaataattccatatttacttgaagggttaagatatgatttggcttgtgaaaaagcaggttttaatcacagtagttttaagtttgaaaaactgaaatatttaaagggcgacaagattaaagcagaatttaaggatttaacttctaatgttgtaaaaagggcagcaaaccaaacacttagaattttaaatgaaattattaaggaatatggctcaccacaatttgtttctatagagcttgctagggaactttcacagcttcctagtgagagaaggaaatcttctgatttaatgattgctaatcaagataaaaatgagcagttaaaggaaaggctaagaagtgaatttaatttaattaatccaacaggtagagatattttaaccttaaaactttatgaagagcagaatagtaagagtatgtataccggaacaaaaatagaagctgatagattatttgaacctaactatgttcaaatagaccatattattccatatagcagatgctttgatgatagctataataataaagttttagttattgcagatgaaaatcaaaataaaggagatagaactccttatgagtattttggaaatgatgaacagagatggaatgaatttatagtaagagcaaatcttttacataatgctaaaaaaactagaaacttactaaaaaagaatttttcacaggaagaatcaaatgaatttattaatagaaatttaaatgatactcagtatgtttctaaattcttgcttaatttattccaaaaatatttaatgcttactccaagcaaaaagtttaaagaaattaagcaaataaaatgtgtttctggctcagtaactagttatcttagaaaatgttggggaattaagaagattcgtgaagatggagatattcatcactgcgtagatgctgcaattattgctagtgttagtgaaggaacagttcaaaaaataacaacatttaataagtttaaagaaaagtttttctttgataaaaaaaatgaaaggtttattagcaaaaaaacaggcgaggtgatgacggcagaagaaaaagaaaattatgaaaaagaaggtattgagcttttaaggggaactcttcctaaactctatgatggatttactcaggaattaaaaattagaagcaaggtaaattattttgattttaattttagcgatgaagataaaaatgctcttgtaaaacttggatactcgcaggaagaagtggaaagtttaaagcctgtatttattagcagaatgaaaaatgttaaaaccacaggtgcgattcataaagacacaatgatgagcacaagagaatttgatgaaacaaaatgtttaataaaaacagtgacattagataatttaaaaattgaaaataaagttgaagaagaacctcttaaagatgacaaataccctgagaaaagaattgcaaattattataaccctaaaactgatagattattatatttaaaacttaaagaaatgttagttgaaaaaggcaaaattttagataaagtttataaacctactaagagtggacagcaaggtccacttgttagaactgtaaaactttacgaaaaaagtagcaatcctgttattacaaagcatggcgctggcgcaaatgataaaatgtatagggttgatgtctatgaaaaagctaataaattctatctatgcccagtttatatgtcagatgtttataataaaactttaccaaataaagttattattagagataagccttgggctgaaatagatgatagctatcaatttaagtttagtttatatcaaaatgatttaattaaggttacaagtaataaagaaattgtaatgaaaaaagataaaaatcatcaaaataaattatctttaaaacctgatgaaattaaaaataatgaattttttgtttattataattcaacaaacatttcaacagcatctattgaagtaatttcatatgataattgttattataaagaaggtttaggagtaacaactcttaaaaatatagaaaaatactatgtagatataatgggtaaaatatataaatcacctaaggaagaaaggaaaaattttaatgggttatattaa

SEQ ID NO: 158 - DNA, 3462 bp, unidentified
  misc_feature 1..3462: note = Synthetic sequence or unknown origin
  source 1..3462: mol_type = other DNA
atgaagtatcgtttaggtttggatttaggtgtaagttctatcggcagcgccgttttagcgttggatgaacaaaataatgtgcaagatattgttgatgccggagtgcgtatttttgaagtttcggacggcgcagaggaaaggcgggcaaagcgttcggcacggaaaaatttaatccgcactaaaaagcgcttggaacttttggcacaaaagttatatgaaaatcagctttgggtttcgccgaatccggagggaacagataatcttaaatcaaaatccccttataagattcgttttgatgccttaaatgaaaaacttgaaaatcaaaattatatcgggcgcgcgattttgcatttggctaaacaccgcggcgctggttttgtttcggctgcgcaagaaatggaagaagaagttttagatgccggcgaaaaatctaaaaagaaacaaactgcctatgaattattggctagtcatttgaaagaaacaaactcccgcaccatcggcgaattcttttggaagcggattttggaaagctatgaaaaagatgaaaacggcgaacacccaaaagtaaaactgcgtactgtgcgtcaaaaatccggcatggtggactatgcgctgcctcgttatttggtaaaggatgaatttaagcaaatttgggataaacaggccgagtattttccgcaaatgcaaaaagcaggcttaaagcaggaaatatatgatattttgttctatgaacgtccggcagctccgtatgcgaccggtaaatgtatttattttagaaatgaggaccgcttgctgaaagcacatccgctttcagaattacgccgcatttatgaagaagttaataatatccgcattttgtcggatactaataaacgcccgttgactttggaagaacgtgataaaattataaatgaattgctgctgcaaggcgaaaatgccggaagtaagtctattaaaaagctgcttaaattatcggcacagcaaaaaatttctattgacggcgataaagataagccgattaaagcttatttatattctcgtccggagtttgctgaaattgagtatattaaaaatctgtcagaagctgaatttgctgaatttatagaatttttagcgaatccggtaagccccgatgataaaaacggcaggctttataatgaagacgaattgattgcccagcttaaagtaattttgaaaatagatgatgaaaagaatatcagcgatttattgataaaactgccaaagggcaggggcatgcttggtgtatctgcaactaaaattattttggaaaagctaaaagaaaatgtggtttcacatcgcgaaattaccgataaattggcaaaagaagaccctcgttttatggcagaagaagaaatagctcggcaaaatcaaggaaaatgttttgaattgccgtattacggcgaaattttacaaaccgatacccagcctttaccgccgttagttatcaaaaataacaagagtttgaaaccggaagaaataaaatggggcaaaatggcgaatccggcagtacacatgatattgaaccaaattcgcttggtggttaatgaaattgtcagaatatacggcagaccatacgatattcatgttgagctggggcgtgatgtcggaatgtctacagataagcaaaagcaatttgaaacagctcagaaagccaacgaaaagcttaatgaagaagctaaaaaatatctgcaggagcatcatatttatgtgacagggcaaaatattttgaaatataaattagccaaagagcaaggctggaaagatgcttataatcctacgcaggcaatctcgcggaactttatggggtttgaaattgaacatattattccgcaagcccgcggcggaactgatacctataataatttatgtttggttaaccgttccgataatgaagctaaaaaagatgactttgcctatgattattttgtaaaaacaaaatcgccggaagttctgcgcgaaattttgaaaaatgcccgtgcaaacactcctaataaagcgtggagatttgaggcagatgcccgtgagcaatatgaagatgagggcgataaggaagaaacaacccgccatatgaccgatacccgctatgtttctaaactgacagcacgttatttgcgggcgattgtggattgttcagatgttaatgaagtatcgcaaaatcgtattttagcagtcaaaggcggacagacttctgagctgcgttggcgttggaatttgcagggattagaatatgatttgatgggtataaaggtaccgagatttttatattggcttaataatgatacaggtgaagtaagttatgaaagaaaaaatgaagatggctggattcctgaaaaaaatcctgaatggtcagtaaagcctcgtattgatcatcgccatcatgctatggatgctataactgtggcttgtacgactcgggctttagtcaagaggttgtctaatgaggaaaaattaagatatatgcctactcctttgccgatgacaagtgtagcgtcagttgctgattttcgccgcagagtgttagaggtattgcgagaagttaaaatttctcacaagccggaccataacaagttggggcagtttcatgaggaaaccggtaaagtaaaattatgtaagaatccggataatccgaacaatttgattacggtatattcccgcaagatttttaaggtagttaaaacatataatgatttggacaagctcttgattcctgatagtgttaaagatagctggtatgaaggaattgctgaaaatcgggcaaagcaagcaaaattggtagctgattttaaacagtattggaatgtagcggaacaaattttgcaagaagaaaatgaaaaagatgtcgcagatggcaaaaaggaacgtagaattactgatggtctgattgcggctaaaacttttcatattttactggataaaaaattatggaaaggcgataaaatcaaatgttacgaaaacgtatcttcatttgtttttgttaagaaacataacttagtttataaaagcggaaacaaccattgtgtggatttctatgagaaagacggcaaagtcggctgggaagttattaaacgctttgatgttaatcaagctgattttatcccgcaatggaaaaaagacggcggaaaacttatctggtcggttcagcaacgtgatatgctggagctggatactccggttgaatgggcttcttatacggataaaccgcgttgtttagctaaagtgaaaaagtttagtgatggtagagtaactatagattatatgactgacgctcgtatgacatcaccaaaagataaaagtttaaaatatatgtttgttcatagtttagaagataggggcttaagttattttataaatcataaaacacgaaaaatagaacttacaccgtttggtaaagtaaagaaaaagcataaggtgttgtggaatggcacgaagacagcggcgtga

SEQ ID NO: 159 - DNA, 3474 bp, unidentified
  misc_feature 1..3474: note = Synthetic sequence or unknown origin
  source 1..3474: mol_type = other DNA
atgaattacattttaggtcttgatgtcggaataggttctataggttgggcggttattaaccttgacaaatatcgcgttgaagatattggagttcgtatttttgaatcaggtgaaaacgctaaaagcaaatcatcatattgtcaggaaagaagaatggcccgtggtatccgaagacttacacgaagaagaagtcatagaaaggataggcttaaatcacatttagaaataatcggattgacaactaaaaatgatattaaggaatattatgaaaacggtaattgcaatataatttcatcaagagtaagagcaattgatgaaaaaatttcgcctgaagaacttgcggcttgtcttatacatatctgtaacaatcgtggttacaacgatttttattcgttaaatgatgaggatgcaacaaaagaagaaaaatcagaatacgaagcattgaataaaatagaaagtcttatgtgcagtaataattacagaactgtagcagaaatgattttgaaagatgatacatttaacggagatgggaaatgcagaaaatatcacaattcggaattttcagatgaaatcaatcttataaagagaaacagacttgaagaagaagtaaatcttattcttgaaaaacaacgggaatactatacctgtcttaatgatgatgctatcaaaaaaataaaagatatcattttctctcaaagagattttgaagatggccctggagataaagacgataaattcagaaaatacaagggatttctcgatactcttggtaaatgcagattttacccagaagaaaaaagaggagagagatttactgccattgctgatgtgtatgctttagtaaatgttttgtcgcaatatagatattacgataaaaatggtgaattatgttttaattctgatatagcaaaggctctggtttcatatgctcttgaaaatgggaatatgaccaaaaaagatcttaaaactattaccaaaaaatttggagttatatttgatgattcaggaacagaagatacccctataactaaatgctttcgttatataaaaggcataaaacctgtttttgatgaattcgggtgtgattggaatgaactgatatctgattatacggatgtagagaataatcttctgaacagaataggagataaattatcaaaatacataactcctaaaagaagaatcaaaaaattggaagaattcaattttgattcgaagatgatagaaaaactctctaaaatgaaattttccggaacatccaatgtttcatataaatatatgaaagatgctatagaagcatttctgggtggggatatctatggaaattatcaggcgagtttcaataaagaaaatacatatacaataaaggaagaagataaaccttataaacttcctccgttcaaaagtgaagatgattgcgaattctttaaaaatccggttgttttcagagctataaacgaaactagaaaaataataaatgccgtagtcgataaatatggctatccttgcgctgttaatattgaaacagcagatgaagtaaacaaatcgtttgccgacagagataaaaccggaagaatgaataaggctaacgaagcagaaaatgacagaataagaacggaaatatcaaaccttcttaaaattgacgagaattccgtaagacctgttcagatagaacgatataaactttgggaggtgcaagaacataaatgtctctattcaggcaaggaaatagctgatcccatacctatgcttgaagataacgatcatttatacgaagtggatcatattattcctttttcaattattctcgacaataccattaacaacaaggcgttggtatatgtcagcgaaaatcaaagaaaaggtcagcgaacaccacttatgtatatgacgcccgaacaagctgagggttataaatcaagagtaaatgcaatgatgaaatccaaaaaatgcagtaagaaaaaatatcagtatcttatgcttgaaaatctggataacaacaatttactcagcgaatggaaaagccgtaatcttaatgacacaagatatatttcaaaataccttgtcaattatatcagagataatcttagatttaatccgaacaatgaatttgcagatgacttttctatcaagacaagcaatagggtctttgcggttaaaagtaagtttacttcacaattcagaaaacaatggctcaattctaaaacatggggtagaaaggataaggaagaacttaaaaaaatcacttatcttgaccacgctgccgatgcgatagtcattgccaattgccgacccgaatttgttatcattgccggagaaaaattaaaactctataatatatggaaacaagcaggaaaatgcattactgatgaatacaccagaagtcttaacaattgcgttgatactcttgtaaagtattatggtatgaacagaaactttgttacaaaaatactaaaaaatccgagttataaagtttctccgataattccgcatattgccgatgagacagataatcgtctccgtgatttcaatacacataggatacttttcaacgctcctgatgatacaaatgaacagataacagaaactttcgtttctcataatagacatctctatgctgatgaccccgaatttgcagaatcattaaaaatgcctgttatctcatacaagcctgagcgcaagtatacaggagaaattactactgaaaatcctatttcagttaaagaaatcgacggagaagaagtgcagctcagtagagttaaaatcacaaagattactccgaaacatctttcaagaataagaactgatgatactgaccttcgttattcattagaatctgctcttaatggtaaaggcgatacatataccattgaaaaataccttaaagacaacaaacttgagtatttcaccactcttaagggcagaaggataaataaggttactgttaaaaaccctaaccctgaccctaaatatcttaaaaaggaaatctccgaaaacaactatacatatcttgataatacaagttattattgccttgaaatttataagacaaaagatggtaataacaacatgctcggaatagcgatgagcgacctggtaaagaaaaacaaaaagctttatctcaagtcttcttttaaataccctaaagattatggcgaacatattatgtatcttttcaaaggcgattatctgagaataaccgataaaaaaggacagataaaatttgaaggatattacttatcatcaaacggcataaaagataaaagtatatatgttgttaaagataacttcgataaaatcttcaaaaaagatgatgacaacaaacagaaagcgagaggcaaaactataaacttggcacagcgagataaatgcataaagttgaatgtagatattctcggaaagataagcggatataacaacggggagggtatttcatgtggagaaccgttatcgttactaaaggagaacgactga

SEQ ID NO: 160 - DNA, 3474 bp, unidentified
  misc_feature 1..3474: note = Synthetic sequence or unknown origin
  source 1..3474: mol_type = other DNA
atggaggaaattaagcagttaagcaaaaatgaagagataccgaagccgacggatttaaactacagaatcggtttggacattggtattgcgtcggttggatgggctgtgcttgagaatgatgacgatgatgagccatgtagaattattgatttgggagtgagaatttttaaaaaagctgagcaggataacggagatccacttgcgttgccacggcgtgaggcacgttcggcaagaaggagacttagaaggcgcagggacagagtattgcgcatcaagaagctttttgaggcagaagggcttataaatatcgatgagtttgaggcgcgttatgaaaaggcagggcttactgatgtctaccgcctcagatacgaggggcttgacagaaagctctcaaatgatgagctggcacaggtattgctgcatatagcgaagcacagggggtataagtcaaacagcaaggcggaagaaactgcaaatagcgaggatgaggcaaagcaaaaagaagctggagaagtaaagaaaagtataagcgataataaaaaacttatgatggaaaaaggatacagaacagtaggagagatgctgtatcttgacgaaaaatttaaaatagattgcaattggaacgcagaaggatatgtattttgtcctagaaataaagcaggtgagtacaaggtaattattcttagagatatgcttgttgaagaggtgaaagcaatatttgatgcacaaagaaaatatggtaatattgcggcgacagttgaactggagaaaaagtatttggatataatgcttagtcagcgttcatacgatcaaggaccggctgcaccaagcagatatgcaattgatggttatgaatttggaatgtgtacatttgaaagaaaaaatgggcatagacgagcaccgaaagcggcatatacatcagaattgtttgttgctttattgaatataaatcacacaaaaatcagagataaggatggaaatttgcgaactttttctgatgaggaacggaaaaagcttattaagctgctccatgtgcagcaagaagtaaaatattcttcggcaagaaaactgcttggtttgcctgatgatgaaacattttataacctgacttacagtaaagggaaaaataaaaactgtgaagatgcagtgtttatcaaaatgaaaaattatcacaagataagagtggcaatgaatgaggagtgcactgataaattacttgatgatgaacgagctgataagtatgacactattgcatattttctaacaaaatacaaaaatgatgatagcagattaaaagagttaagggctttgggaataggaggaaatgaatgtgctaatttgcttaaattatcatttacaaaagcgcaaaatctatctcttgtggcaatgaaaaagataataccttttttgctggatggtaaagtatacagcgaagcatgtaagcttgccgggtatggcgagtatgaggaagataaaaacaccggaaaattaaaattgttaaaagggaaggaaattacagagtatgtaaatgaaatttccaatcctgttgtcaggagagctgtatctcagacaattaaagttttaaatgcaattataattgagtatggtagtccgcaggctgtaaatattgaattatcacgccaaatggcaaagaataaaaatgaacgtgataaaattgataatgatatgaaaaaaagaagcgcggaaaattcgaaaattcttaatgagataatggaatataaagcaaatccgacgggtaaggatgttgtcaaatatcgtctttggaaagaacagaaagaggtatgtttatatacgggtaaaaaaatatcggcggacgaattgtttgctggtgatggtgagtatgatatagatcatatacttccttatagtaaaacttttgatgatagttatcataataaggttctcgtaaaagctgaagcaaatagagagaagggaaacagaaccccttatgagtatttgatttcaaaaggcggtgaaaaagcttgggaggaattttctgtcagggttgaacattgcattaaagactataaaaagaaacagaaactatcaaagaaatgtatcacagaggatgatacgaaagagtttaaaaggcgtaatttacaggatacgcagtatgcaacaacatttatttataatttaatacgacagaatttatacttaaaaccatatcaaaatctcacaaataaaaaagtacagcaggtagttgcattgaatggttcaattacaagttacttaagtaagcgttggggacttgaaagtaaggatagaaaaattgacacgcatcatgcacaggatgcggttgtaatagcgtgcactacacaaggaagaataaataaaatttccaattattttatgtgtagagaagcagaattatccggtaatcatgttatttcaagaaagaaatatgatgaaaattctggtgaggaattccctaaaccatggaagtattttaaaaaggagcttgatgtccgtatgtcaaggtatcatggtgaagcgggagcgatagactatgttacaacaccaagagaatatcttttattagataaggatgttcgcaagcatataggttatcctgactggatgtttgtcaaaggcagacctggacgaaggggtgttcttgatggaatttttgtttcgagaatgccaagtcgtaaagtaagcggaaaggcacatgaggacacgattcgttccgcaaaatattataaagatggtggatgtggagtgaataagggatatgttgtttttaaaaaaactattcagggcataaagcttgatgaaaatgacgaaattaaggatttttttaatcctgatagtgataggttgctttacaatgctctggttaatagacttaaacaacataataacaatcctaaagaagcttttgcagagccattttacaagcctaaatcggatggaactccgggaccgattgtaaaaaaagtgaaagtgtttgagaaaatgacgataggtgtatctttagaaaaagctgaaggatatgctggaaacatatctggaagtatgattagagttgatttttattatgttaatggtaaatattactttgtacctgtttatgtatcggatgttgtaaatcatcaattaccaagaaagcgtgcggttaaggagaaagtctcatcagagtgggaagaagtagatgataaagattttatttttagtatatataaaaatgatttagtatatattgaaaatgataaattgcctttaacgcataaaaacaattctgattatcctttaccggatgctaaaaatggtgttttcatgtacttttgtgatgcggacataagttctcttgctatcagatgtgaatcaaatgatggaagttttggatttaggagcagtatagtaacagtaaaaaaattttgtaaatgtcaggtagatgttttaggaaatatatcatttgttcacaaagaaaaacgtatgacatttaactga

SEQ ID NO: 161 - DNA, 3501 bp, unidentified
  misc_feature 1..3501: note = Synthetic sequence or unknown origin
  source 1..3501: mol_type = other DNA
atggaggaaataagacagttaaacagaaaattagaagaaactaagccaattgatttaaattataggattggattagatattggaattacatcagttgggtgggctgttcttgaaaataagaatgatgaaccgtttagaattattgatttgggagttagaatttttaaagaggctgagcaatcgaatggtgatccgcttgcattacctagaagaaaagcacgctcagcaagaagaaggacaagaagacgcaggtttagattagaacgtattaagaagctttttcagacagagggacttattgatattaaagagtttgaggcacgttatgaaaaggcaggacttccagatgtatatagacttagatatgaggggcttgacaggaagcttacagatgatgaactggcacagatattattgcatatcgcaaagcacagaggatttaaatcaaacagtaaagcagaagagactgaaaatgaaaatgacgatacaaagaaaaaggaagcaggagcaataaaagatagtattagcaataataaaaagattatggaagaaaagggatacagaacagttggagaaatgctgtatcttgatgaaaaatttaaaatagatagtaattgcaatacaatggggtatgtattttgtccgagaaataaacaaggtgattataaggtaataatgcttagagatatgttagtagatgaggttcatgctatatttgaagcacaacgtaatttggataatacaagtgcttctgatgagcttgagaaaaaatatcttgatataatgcttagccaacgttcattcgatcaaggaccgggagcaccgagtcagtatgcaatagatggatttgattttggaacgtgtacacttgaaaaagctaatggtgagaaacgtgcaccaaaggctgcatacacttcggagctgtttattgctttgcaaaagataaataatacaagaattgtggacaaggatggaaatataagaaatttttctgacgaggaaaggtggaatattatacgattgattcataagcagcaagaagtaaaatattcttcgatacgtaatgcactttgtctgtctgatgatgaaaaattttataatcttacatatagcaagaagaaagacagcgaacagagcgtttttattaaaatggtaaattatcatagtataagaaaagcgttaaaagcggaatgctctggtgaattacttgatgataaacatgcagagttgtatgataatatagcatattatcttactaaatataaaaatgatgatagtagattaaaagaattaaaaaatcttggaataggagaagaaaaatgcaataatttaattaatctatcatgtacaaaaacacaaaatctatcatttgttgcaatgaaaaagataattccatttctgctagaaggaaaagtatatagtgaagcatgtaaaatggctgggtataataactcaaatgaagatagttgtgcagataggttaacattattaaagggagaaaaaattaaagatgcgattaatgaaatatctaaccctgtagtaagacgagcagtttcacagactattaaagttttgaatgctattattcttgagtatggcagtccgcaggcaataaacattgaattatcaagggaaatggcaaaaaatagaattgaacgtgataagatagataaagatataaaaaatagaaataatgaaaatcaaaaaattcttgatgaaataagggaatttaagcctattccgtcaggtaaggatattgttaaatatcgtctttggaaagagcagaaggaaatatgtctgtatacaggtaaaaaaatatcagcagaagaattgtttgcatctgatggaggatatgatattgaccatatacttccgtacagtaaaacatttgatgatagttaccgcaataaagttctggtaaggtctgaggcgaacaagaataaaggtaatagaactccttatgaatatttaatatcacaaggtggtgagaaagcttgggaagaatttactatcagaattgaacataatattaaggattataagaagaggcagaaattattaaaaaagcatgttactgatgaggagacaaatgagtttaaaagacgcaatttacaagacactcagtatgcaacaacatttatatataatttaatccgccaaaatctttatttaaaaccatatcagaatcttactggtaaaaagaaacaacaagtaatggctttgaatggagcagtcacacattatttaagtaaaagatggggattcgaaagcaaagacagacgtatagatacccaccatgcgcaggatgcggttgtcatagcttgtacaacgcagggaatgattaatacaatatcgaattattcaaagttcagagaactggagcttaataagattaataaatccagaagcataaaagtagatgagttatctgaaaatgaatttataaccagagagcaatatgataaaaattttggcgtggaatttccattgccatgggacaattttaaggaagaacttgatattcgtatgtcaagatatcatggtgcaggtgatgaaaaatttttagagacatcacctagggaatatattcaatcacatagtgatgtgagcaagcgtttggattaccctaaatggatgtttgttaaaggaagaccaggtcgcagaggcgtacttgatggaatttttgtttcgagaatgccaaatcataaggttacaggtcaggcacatgaggagactatccgttcagcaaagtattataaggatggtggatgtggagtcgataaagggtatattgtttataaaactgcacttacaaatttaaaattagataaaaataatgaaatagctaactattttaatcctgaaagtgataagttattatataatgcgttggtagagcagcttaaagagtatggtaatgattcgaaaaaagcatttgaaaaaaatttttataaaccaaaggcagatggatcgaaaggaccggttgtaaaaaaagtaaaagtatttgaaaaaaagactaccggagtctatttgaagaaagttaacggatttggatacaatgatagcatgattagagcagatatttattatattgatggtaaatattattttgttccagtttatgtttcagatactgtaaaaaatagtttaccaaatcaacgtgctgctaaagacaaaaattcatgcgattgggaagtagttagtgacgataattttctttttagcctatataaaaatgacctattatttatgaagaataataaacttccattaaaaagcatagatgaatataagtatctcgtgcctgatagcagcaaaggagtttttatgtacttttgtggtgcggatgttagtgggctggcttttaaatgtgaatcgaatgataaaacatttaactttagaagcagcataacaactattgaacaactatgcaaatgtcaagtagatgtattgggaaatatttcatttgttaataaggaaaaacgtatgccgtttaattaa

SEQ ID NO: 162 - DNA, 3552 bp, unidentified
  misc_feature 1..3552: note = Synthetic sequence or unknown origin
  source 1..3552: mol_type = other DNA
atggcaaattaccgttggggtattgatttgggcacatcttctattggcgtggccgtttacgagacggacaataacggaaagattatttccttaaaacatttggacagttatatctttggcgaacctgtggcacccaaagaaatggtaactttaaacaccgcccgccgttcggcgcgtttgattcgccgtcaggtggagcgcaaggctgcccgccttaaaaaaatgtcctatattgctaaatccttgggggttacgccggaagttctgcgcgccacgccggaggacgttgtagccttgcgtgccaaagcggtgcgggaggaaatttctatcctgcaacttatcaaggtgctgagccatatagtcaaaaaccgcggctacaaaggtaccttgtccgcagacgacaaaggcaccgtaggtaaaaaattatcccaaacggcgcaagcccttaccgggggtaaaaccttgggcgaactcttgtatgagcgcaaaacgcaggccaacggccagccgtggcggaaggtggaagaagacggcacctttatttaccgccaattagtagaggatgaatttgcccgaatttgggatacgcaagccaaatttcaccccgagttaaacggctcctacgctgtgtggggagataaaatgttccccgatttcccgggcaaaacggaaatttcgcttaaagatgcattccactcggcaatgttttaccaacgtccgataaaatgggaattggaaactgtcggaaactgcgaaatttatcccgcggaaaagcgcgccgccgcggcccaaattgcctatcagcattaccgtatggcaaagactctggccgatttgcgcgtacgcaataaaaacacgcgcgaaagtgtcccgcttaccttggcgcaaaagtcgcaactttttgagtttttggacgcgcatacagcggaatattcgccggaaaccaaggctgttccgtttaccgtgttatataaggtgttgggtctgccggaaggctgcacctttaccttggaccgcacttatcacgccagaggcgggctgaaaggaaataccaccttgtacgcctttgaaaaggcgggtgttttaaacgagtggtccaatttaacggacacggcgcaagaattggtattggagttttttgccaatgtttccaacttgtcggacattgaggataattcagacgcgtatataaaagagcgtgtgccggaattaaccaaaaacttaaagcccaccccgcaagattgcgaagcgtgctgccggtttattttgctgttaaaggcgcgcggtgtactgggtgaattagtattagagcaagggcgcagttcgtacagcattaaagcgcttaaaatgctgacggagcgcattatgcagggcgaacaggaagcggatattttggcggacatagaagcgcaaaaaacgcatccgcagggcaaattccgctctaccgagactattttgaaagagcaagccattaacgacccggtggttataaaggctttaaacgaatttcatcgtgtggtccaatatttgctttatcggaattggaaacccaaagaaattattatagaactttcccgtgatatgaaaaaatctttaagccgtcggcagtttttagaggctcaaaacaaagtgcaggcggatgaacgaaacgcggcaaagaaagaactagtagaagaatttggtgtattacctactcctaataatatagaacgctacttgctttggaaagagcaggctggaatgtctccttatagtgataatggaagtacgaaaatatcggacgcagaggcttttgatagtagagaaacccaagttgaccatattattccacaacaaggggaaattggtggtccaaatacttttggaaataaagttttggtttttacaaaggaaaaccataaaaaaagcaaccaattaccgtatcaatatgataatggaaagtttaaagaagaaatagatgcttataaagcgtggttagtggacaataatttgttaggtaaaaaacgtagcaatcggaaaaaagtagaacctttttaccctgcaagcaatttaattaaattcgtggagcgattgcgcatattgaaagaaaaagagtggaaatggtctcaacgggataacgaattttggcttacgccgaaaggccgaaatatagaagataaaataaataatctgcttaaaacgcccgaagagttaaaacaagattttgtggatcgccaaaaccaagaaacggcgtggataggcaaagttgtattagggtggtgcaaagatatttgttttgcacagcccacttttggtactttaacagcgtatttgcgtcggcaattacaatttgaccgtattattcctcaaattcgtttttcagaaggaaagcccttgtatgatacagataaaaaaatgcttgatagcaacaaattaaaggaaattttagaaaatgtcccgtatgataaattgagtgctatcaaacctgaatttgaaaaatattgtgctgatttttttaagccgtgcgatacaacaaaagattatgccaaggcgttggcgcggtttcagacagaaatttatggaagtttagataaacggtgcgaccaccgccaccacgcggtggatgcggccgtaatcggtttgtgctctgtttcaatagttcagaaagcgcaaaatttctataagaagcataacacattgtacataaaagcctatgatgaaagaggtaaccgggataagaaacacgatgttgaggggtttttgttggaaaatgatacaattccaaacctagcccgtataagaaaagaggtgcaagcccgattgaccaactatgtggtatggcacaagccggaccattttccaagcggcgcgctgtttgaccaaacggcgtataatgttctgcccaaagacggcgaaaaacgctttgtaaagcgcgccccgctcattagtttcttaaagtcaaacgaaaagaaaaccttggaaaacttggagaaattgctgttttgcgacacggtaaaaaacgaaattattacccagtttaaagaacgcctggcgcaagggatgacgcaagaggaagccttgtgcggaaagaaagacgacccgtccgacgggatttcttaccggggcaataaagtgaagcaagtaaaatatatgtatttaaccggccgcggtatccgcgtgtttgacgaaaacgcggataaagagatttctagcaaggataaaataggcacccagcacaaaaaagcctatcaaaacggcgggtatgcctgtatggactttgacgccaaaacaggcaaaaggttggcgcttgttccgctgtggaagtatggcaaacaaaagcaagtaccgcccaatgtggtgcgcgtgtttattggggatattctttttaacaaaggggttaagcaatactttttggtaaagcaatttagcgcgagagatggccttgggctacttttgacgacggaagtgaatggggcaaggttatttacttccaatcttaaaaattacagtgtggtatccactcgtcaggatatcgccaaattaaaagataatgagcatacaacatctgattag

SEQ ID NO: 163 - DNA, 4008 bp, unidentified
  misc_feature 1..4008: note = Synthetic sequence or unknown origin
  source 1..4008: mol_type = other DNA
atggataaattttatttaggaatggacataggtacaaattcggtaggtatggcgtgtaccgacgaagaatattctttgctgcgcgcaaacggcaaagattgttgggctgtgcgcttgttcgacgaaagcgaaactgccgttaaaaggagaaatttcagaacggctcgccgccgcattgtgagaagaagagagcgcattaagtttttgcaaggcgtattcgccccgtttatcgatgacgaaacgttttttattcggttaaacgacagccaatattaccccgaggacaaaaacggacttttaaacgggaataaaaacaacttgtttgccgacaaaggttatacggataaagattttcataaagaatatccgaccattttccatttaagaaaggcgttgatgacccagccgatagaggacttgcggctttattatcttgcaattcatcacattataaaataccgcggacatttcttgtttgagggcggaatggctgatatcagagacataaccaaactcattgaaaatttaaacgcggtgtgcggcgacttgttcgatgaagacgcgcctaatttcgacgtaaacaaatctcacgaagccaaagaaattttgcttacttacggcaaagacaagcaaaaaagacttgaaagtttattcggcgtcacttcaaacacgggaaaagaaataataaaaggcatttgcggttatactataaagcccgaaaaactgtttgcaggcaattatcaagaagaaaaatcgttttcctttaaagacctcacggacgaaactttcgaggcgatgcgccccacttattcggacgatttttcgctgcttgaaagcataagggcgatatataatttcgtcacttttgaaaagttgctcgaaggaaaagaagatatttcttccgcaatgatcgacctttacgaaaaacacaaagccgatttaagacttttaaaagatttcgtacttaacaacgccacgagagaagaatacaactcgcttttcaaagtaataggtaaagaaaataattatgcaaaatacgtcggttttaccaaaaagggcggggacaaaaagaaagcaacccccgcacagtacgacgaatttttgccgtaccttaaaaaatttataacttcgctcacgcaagtaacggacgaagaaactaaagaaaaaatacttgcagaaatagaagcgaagacctttttgcccaaaattcttcacgccgacaacggactttttccccaccaagtcaacgaagacgaactcaataaaattctcgcaaatatggcgaaaattcaccccgaaacggagtgtataaaagacaaaatcaaaaagatatttttgtatagaataccatattttgtcggtccgcttgcgggcgcaaacggctgggcggtgagaaaagccgagggcaaaattacgccgtggaatttcgacgaaattatagacaaagcgcaaagcaacgaaaatttcatgcgccgtatgacgaatatgtgcagttatttatacggcgaagaagttttgcccaaagcctctataatttatcaaaaatacaatgttttaaaccaaataaacaaattaaaaatcaacgacaaacccataaacgtggctttaaagcaagatatatttaatcaacttttcttgacgaagaaaaaagtaaccgacaatgcgattaaagacttgctcgttcgccgcggaattatatccgaagaggagaaaaagacgattataatttcgggcaaagacgggcagttaaacgctacgatgtcgtcgtatcttcaacttaaagacatattgggcgatttcgtagacgaggacatacaaaaagaagacagcgtgtgcgaaaaaataattttgtggcacacccttaatacggacaaaaacatagttgttgatttaatcgagagaaatttcggtaaaatacaaataatcaaagacaatttaaagcaactaaaagggcttgtgtttaaagatttcggcagattatcaaagagatttttgaccgaaatgaaaggcgtcgacaaaacgacgggcgaatttgtaagcattttggacgttttgtacgagaccaacgaaaacttaaatcaaattttgtttgacgaaagatataatttcggcgatgtgattaaagaggaaaacggcgaaaaacaaagcgaaataaaatatgaagatatagaaaaattatacgtttcgcccgcagtgcgccgcggaatttggcagtcgcttaaaatggcggacgagtatattcaagccataggcaaaacgcccgacaaaatttttatcgaagtgacgagagaagagggagtaaaaggcgatgccggcagaaaatcgtcccgtcaaaaacaacttttagaaaagtacaaaactattgaaaatatagaactacttaccgaaagtctcacgaatgaaagcgatttaaggcttagacaagaaaggttgtatttatattatcgtcaactcggcagatgtatgtattcgggagagcaaatcgaccttgatagtttaaatacaaatcagtacgacgtagaccatattttaccgcgcacgtatataaaagacgatagtcttgacaataaagtgcttgtaaaaaggtcgtgcaacgcaacaaaaaccgatcgttatcccatacctaatgaaattttgggcaaagacgtcaaaaagcattgggaattgttgcataaaaaagatttgatttccgatacgacttataaacgccttacaaggacgaaaccgcttgacgaagacgattacaacgactttattaaccgtcaaaaaacgattacagaccaaaccgcgaaagccgttgccgaactattagcgcaaaaatatcccgacacaaaaatagtgtacagcaaagccaaaaacgtatccgacttcaagagtaaagcgggtttggtcaagtgtagagagacgaacgaccttcaccacgcaaaagacgcatatctcaatatcgtggtaggcaacgtatacgacacgtgtttttcaacgcctatgtcaatgttccgtcaagacggcgacaaatggcgcacgtacaatttaaaaacgttgtttttccgcaatataaatggcgcatggacgagtgacgacaacaaaacgcttgttaaagtaaaagaaacctttaaaaagcaacgcagcataaacgtaacgagatatacttattgcggtaaaggtgaattttataatcaaacagtttatccgcacgacgatacgggcgtaaacgcacccagaaagagcggttctccccttaaagactgcgcaaaatacggcggctataaatctcaaaacactgcttatttcgcggtggtcgaatcggaaggtaaaaagggtaaaattataaaaaccatcgaggctgtgcccgtgcttgttacttataatttaaagaacaaccccaacgccgtgcaagagtatttcgaatcttatttgacaaatcccaaaattcttgtgccgaagttaaagattaagcaacttatcaagtacaacggtatgccttgctatattgctggcactacaggtattcaaataatattgcataatggtgtgcaaatgtttacggacggaaaaacggacgagtacatcaacgcgcttttaaaggtggcagaaatggacaaaaaccaaacgtgcgataaagacgccgaaacttatttaataaagacaaaccgctttaaagaagtcaagttggaagtaaacaagcaaaacaacattgctttatacgacgaatttataaataggttgtcaagcggtttatatggaaagatgggatcagcgatatcgtatttaacaaacttacaaagcggtagagaaatatttattaatttaaccactctaaatcaatcgcttgcgcttttgcaaactttaaaattttttaaatgcaatgcagaaatggctgatttatcgttaattggcggtgcgagtcacgcaggaaagatatatatcagtagagacattacaaaagccgaagtcgtgcttgttcatcaatcgccttgcgggcttactttaagagaacaaaagatataa

SEQ ID NO: 164 - DNA, 3615 bp, unidentified
  misc_feature 1..3615: note = Synthetic sequence or unknown origin
  source 1..3615: mol_type = other DNA
atggaaagaatactgggtattgacactggaacaaatagccttggttgggccattgtcgataaggaagaagggaaatcgacgcttatagcgaaaggaacgaatatcttcacagaaggcgtaaaaatagaaaaaggtatagagtcttcaaaggctgctgagcgaacaaagtatcgttctgttcggaagcactattggagaaggaaaataagaaaaataagattgctgaccatattgagtgagaatcatttgtgtcctcccttggataaatcaatcctgcgtcagtggagattaaagaaattatatcctgacaatgaacttttcatggaatggcagcggacagaagacaaagcgcaagtcaatccttacaagttccgttatatttgtttgacccagaaacttgacatgtctgatatcgttcagcgttatatgttaggccgtgctttatatcatctgaatcagcgtcgtgggttcctgagcaaccgtaaggaagccaccagagaatcggaaggtgcgttaaaagaaggaattagtgccttatctgaagaaatgaaagaagcaggatgcgagtatctgggagaatacttttatcagttataccagaaaggtgaaaagataaggaatcattatacagccagaaaagagcattatctgaaagagtatcgtgctatttgcgagaaacagggattggaggctgcacttgtaaagaagttggaacatgctatttttgaccagcgcccacttaagtcgcaaaagggacaagtcggcacatgtacatttgaaaaaggaaagtctcgatgtccatcttcgcatcctttgtatgaagattttagaatgtatagttttcttaataatataaaggtacaagttaatacactatacgagaattgtgaacgtgggttgactaatgaagaaaaggcccgaataattcctttatttaagcgtaagtcaaagcggacattcttgtttgaggacatcgcgaagaaactggcaggcaagaacaattattgctactacaaaagtaatgaggataagccttataagtttaactatcagatggatactctagtgtcaggtagcattgtaaatgcccagctggaagaaatctttggggaggactggctgacctgtgtatgtgaagtatatacgcaagccaataacaaaactcgtttccagataatgaacgatatatggcatacgttgttcttctatgatgacgacgaaaaattaaagagttttgccgtcaatcgtttacaattggatgatgaacaggcggataagttcagtaagatttctatgccaaatgattatgctgcgctcagtctaaaagccattcggaagatattaccttatatgcgtgactatggtttgatatactcagaggcagtttttcttgccaatcttgttgagattatgtctcgatatatctggagtgtaaaggaaatgcgcgaagcagcaatagaaaatgtaatagaggtgatgcattcctatgataagaataatattgacggtatgacgttggaacagtgcgtaaaggcgttcttgcacgagcgatacaacgtcagtgacgtggatttaaggaaactgtatcatccttctatgatggacctctatcctcgtcagcgccctagagagaatggtgtctatcagttaggttcgccccgtattagtagtgtcaagaatccaatggctatgcgctcgctattcagattgcgtaagatagtcaatctactgcttaaagagcgaaaaataacaccagatactaaaattcatattgagttttcgcgtgatttgaatgatgctaatcgtcgttgggctattcaaacatggcagcgtgaaaatgagaaagacagagagaaatgtcgcaaggagatagagaaatatatagcaaatcctaccgatacagatattcttaagtatcaactttgggaagagcagaaccataaatgtctttatacgggggaagaaattcgtctgacagactttttaggtaataatcccaggtatgatattgagcatactattcctcgtagtgcaggaggtgacagcacgaaagcaaacttgacgctttgtagttgcaggtataacagagatgtaaagaaaacaaaattgcctacgcagttgagcgagcatgatgaaatattggaaagaatagcggattggaaagaacggtatgaagacttggatagacagattagaaaaataagtaccaaggggatatcgtcgaaagaagaaaaggataaaataattaaaaggcgtcatctgttatccttgcagcgagattactggcgtggaaagtatcagcgattcacgatgaaagaagttccagaaggtttctcacgccgtcaggggacagatatcagtgtcatatctcgttatgctcgtatgtatctgaaatcagtatttaagcaggtatatatagtaaaaggtgttgcaacgtcagattttcgtaagatttggggcatacaagaggagtacacgaagaaagaacgagtcaatcatgttcatcattgcattgatgccattacgattgcctgcatagacaaatcggaatatgacaagttggctcagttctatcaccagtctgatgaatacaagttcggtagaggtgagaagcctcagtttgaaaaaccttggccgtcgtttgtcagcgacatcaagcaaatacaggacgaattgctgatagcacattacaccaaagacaatatgtccaaacaggctaaacgttatgtccgtgacagccatggagataaggtgttgacacagggagatgtcgctcgctcatcattgcataatgaaacttactatggtgctatcaatgtggatggcgttgttaagtatgttgttaggaaaagcctggatggattagatgagaaagatgttaagaatattgtagatggggaggttcgtgctaaggttgaacatgccattcgacttcacggttctcttaagaaggcattggaaaactccatttggatgaacgaagaaaagcaaatacccataaaaaaagttcgcatatttacaggttctgtcactcgtcccatccatattcgacagcagcgtgacctgtcgaagcatgactataaacggcaataccatgtgcagaatgaccgcaactacatgatggccatttatgttgggcaagataataaaggaaaggagaaacgggaatttgaactcgttaacaacattacagcggcaaacttctataggaagagcaatgataaagtaccgacgaacaaccaactactacctatttatagtaaaagtggctatgaacttaaatatagattgaagattggaacaatggtgcttctctatgaaaatagtcctgaggaagtctgggaacttgataggaaaaacttgcaaaagaggttatataaagtgactggaatgtcgtcgatgattattcagggtaaatttgagtatgggacgatagaaatggttcatcatcaaaatgcaaaaccaagttctgaaattaaaaagattaatggggagtataaatctgatgaggattttcggccggggattaagatgcttcattcccaaataaaagttttggtccagggcgtagattttgagattaacgatttaggtgagataagtaggttgatatga

SEQ ID NO: 165 - DNA, 3624 bp, unidentified
  misc_feature 1..3624: note = Synthetic sequence or unknown origin
  source 1..3624: mol_type = other DNA
atggaaaaaatcctgggtcttgatctcggcaccaattcaatcggatgggccgtaatagaaagaaaagatgacaactcatgtgctcttctggacaagggagttcatatcttccaagacggagtagctcatgataaaagcggagagaaacccgccgtacaggaaaggactgccgcgcgtgcttcccgcagacactatttcaggcgtcgtctccgcaagattgaactgcttaaggtcctcatcaagaacggattctgtcctgtcctttccgatgaagatctgatgagatggaaaagcgagaaggtatacccgctggatgaggagttcatcaaatggcagcggacagagacggaatcagacaagaacccctatcgcgaccgcttcagggctgtcacggaaagacttaatctttcagacacccgtgaccggtatgtcctgggccgtgccctgtaccatctcaatcagaggaggggctttcttagcaacaggaaggatgccgctgaagaccagaaggacggaaccgtaaaggaaagcatcacaaaactgaccgcagatatgtctgcggccggatgcaggtatctgggagaatacttttacaaactcttcaacgagaagaagaagattcgcactcactatacggctcgtaaagagcactacagggaggagttcaacgccatctgcgaaaagcagcagctggacgccgatttgaagaaagccctggaacgggctatcttctatcagagaccgcttaaatcccaaaaagggaacgtcggcaagtgcagctttgagaagcggaaaccaagatgtccgctctcccatccgcgttacgaggaattccggatgctgcagtttatcaactcagtgagaatcaaagggcctgaagacgaagccttccgccctcttaaccacgatgaggcagaggccatcaccccgctctttttcaggaaatccaaggccgattttgactttgaagaaatcgcaaagagactagcgggcaaggggaattacggctacaaggatgacagagcggctcacccttatcttttcaactataagatgaccgccagcgtctccggctgtcccgtcaccgcttccatcatccaggctctcggcatggaacccaacaggaactgggccgaggacctgtgcgccttatacactaaaggtgaagggaaagaccaggagcagattctgaatgacatctggcacgcgctatactcctttgatgacgagaagaaactgacagagtggctacgaatctcccttcaacttggcgatgacgaggcgaagaacctggccaaggcccggataccgcaaggatacgcatctctcagcttgaaggccatcaataagatattgccctggctcagaaaaggcctcatctacagcgacgccgttttctacgccaatcttgacagtgttctccccgcttcagtgaccggagatgccaccaagctggatgaggtatatgacaatatgagcgtatgcctacgtgactttgatcagaatccactcaatcgcacgtcgaataaagctgccgtgatttcggactatcttatcacggtcgcggaaggagtaaaggttgataagctttatcacccttccatgattgaggcctacccggccgcacaacgagataatcacgggagaatccgccttggttctccccggttgaattccttcaagaacccgatggcgatgcgggcactgttccgtctgcgcgccttggttaacgcccttctggatgagaaggtaatagaccccgacaccaaaatcaacatagagttcgcccgggaacttaacgacagcaacaccagaaaggcgatagctgactggaataaggaacaggaagatctccgaaagcaataccgggaagaaatccgtaacctttttagcggcaattacgagccaacggaggatgacttgctcaaataccgtctatatgaagaacaaaagcacatctgcctgtataccggcaagcagatttcccctacaatgttccttggcaacgctactgaattcgacatcgagcatacggtcccccgttccaagggcggtgacgattcgctggcaaacaagaccttgtgcgacagtaagttcaaccgggaggtaaagaagaccaaactgccttccgaactgcccgagcacgagaccattcttcaaaggatagaggagtggaaatcgattatagaagatcttgacaagcgtttgtcagctcagcgccggaagtgcaaggcggcgagtacaaaagaccagaaagatgcggcgctcaggaccatccattaccttagaatgaaacggaattactggaaagggaaatatgaccgcttcgtaatgaaagatgtcccggaaggattctccaaccggcagggagtagatatcggcatcatcggtaaatatgcccgtctgtatctaaagacggtcttccaaaaaacctatgtcgtcaagggtgccacaacctctgacttccgcaaagcgtggggcctgcagaatgagtatgccaagaaagagcgtgtcaatcacgcacaccactgcatagatgccatcactatagcctgcatcgggaagggggaatatgaaagatgggctcagtatatgaggcaaatggacagccacctgttttggaatgatcccaagcctcgttttgaaaaaccatgggcaaccttcacggaagatgtgctggcggtaccgtccagtctgattgtttcacattacacccccgacaatcttccgaaactaagcaagaagaaagttcgtatccgtggaattatccagaagaatcaagaagggaagcttatgtacacacagggagatacggctagagcccttctccacaaggatactttctatggtgccatccagagcaatggtgacattcgctacgtggtacgtaaagccatcgatgcactgaaggacagcgacatacagaacatcgttgacgaagccgtccgcgagaaagtcagggccgcagtgaaacagcacggtaatcttaaaaaggccgttgccgaaacaatctggatgaacgaggaaaaacagatcccgatcaagaaggtcagggttttcactcctaccattaccaatcctatccccctcaaggctcatcgtgacctttctgagaaggaatacaagaggcagtactatgtgtccaatgacagcaactactgcatggctctctatggagatgacaaaccttctttcaaattattcagcatgctttccgcagtcaaccatttcaacggcaagcccgaggaatggattgggagtgaagataagcaggggcgcgctctgcggtgtgtactgaaaccggggacgatggtactcttctacgagaacacgcccgaagagctacacgactgttcccaaactgaactgtccaagagactgtataaggtaaccggcctgtcccccatgacaattcggcagaagtatcattttgggagaataaccctgaagcaccaccaggaagcaaaacgtgcgtcagagttaaccgaaaaaaatggattgtggaaagaagtcgaggcttatcgccctgtcatcggtctcaacaacaatcaggcgaaattcatagtagaagggaaggactttacacttacggtcaccggaagaattattttgcgaaagaaatga

SEQ ID NO: 166 - DNA, 3633 bp, unidentified
  misc_feature 1..3633: note = Synthetic sequence or unknown origin
  source 1..3633: mol_type = other DNA
atgaaaaaaagaatattaggtatagatactggtacgaatagtcttggatgggctgttgtagataagaatgacaaaggagagtattctttagtaaaaaaaggcagtctcatttttcaagaaggtgtaaagattgagaaaggtatagaatcatctaaagcatctgacagaaccttgcatagagcattacgtaagcagtatttccgcaggagattaaggaaaatagaaatattaaaggttctgatagattttaggtggtgccctccactttcttcagatgctttacataaatggcacacccaaaagatataccctatggatgatgcctttatttcatggcaacgcacaaatgacaattatgaagagaatccgtattattacagacatgtatgtctgcatgagaaattggatttgaaggataaaagtagttgttatatcttgggacgagcgatgtaccatctcgctcaaagaagaggattcttaagtaatcgtcttgatcagggaaatgaagatgaatcaggcaaagtaagtgagggaatatcttctttgtcaaaaagtatggagaagacaggatgtatttaccttggagatttcttttataaaatatataaggaaaagggaaatacagaaaggatacgcaaccgttatacagatagggaggaacattacaagaaagagttttacgctatttgtgaaaagcagaatctttcagaagaacagatatcacgattggaaaaggcattgtactttcaacgtccattaaagagccaacggaaaggaattggtaaatgtacttttgaaccaagcaagtcgcgtgtttcagattctcatccatctttcgaattgtttagaatgctctcatttgtcaacaacataaaagtaaaaggtccgcatgatatagaatcacgccaactaacaacaggagaatttgaaaagataaagccgttgttttttcggaagagcaaatcgcagtttgattttgaagatattgcaaaaactatagcaggcaaaaataactatcagtatattaaagagtcggatgataagtcctataagtttaattatagaatgactcagggtgtaagcggatgcccaacgatagcaaatcttaaatctatatttggtgaaaactatgcttatgctatagcagagagatatattttgtcagatggtaagtcacaggagcagatggtgaatgatgtatggaatgttctttttagctttagcgacaagaaaaaagtcgaacaatggggcaaggagaaacttcaactcacagatgaagaagcagagaaattttcaaagattcgccttactcatagctacacctcaattagtttggctgctatacgaaagattcttccatggttagagcgtggattgatttattctcatgcagttttgatggcaaaagtgcctgacattgtaggtactgaaacatggaaaaaacgtggagaggaaataacaaaggaactgatgtctttgattgctaatttcaatcctcgtgacatctctatgcaaggaacactggattattgcataaaagacatattgaaagatatgtgcgaactaaagcctggtatggtagacttgttgtatcacccatcaatgatagatacatatcctgatgcaaagaaaaacgctcaaggaatatatcagctgggctctcctaagactaatgctgtaagaaatcctatggcaatgcgttcgcttcatcagttgagaaaggtaataaatgctttgctcctcgaaggtactattaataatgaaacagaagtacatattgagtatgcacgagaattgaatgatgcgaataaacgcaaagccctagctcagtggaataaagatagagaaacaataagaaagaaatactatgatgatattcgtaggttatataaagaggagtgcggaaaagacatagaacctacagatgacgatattacaaaatttcagctttggacagaacaaaaacgtatatgtttatatactggaaaatcgataggtattcaagactttattggtcctaatccttcctgtgatatagagcacacaatacctcgtagtgttggtggtgatagcactttggagaatatgactctctgcttcagctttttcaaccgagacataaagaaggcaaagttacctacccaactcagcaattatgacgagattatgataaggctggaagactggcggaaaacgatagaaaaactacaaaaagacgttgatcgtgtaaagactcattctggtatggataagaacactaaagaccgcctaatccagaaacgccatcgtctaaaaatagaattgaaatactggcaaggaaaatacaagagattccaaatggaagaagttccagaaggatttgctcgtaggcagggtgtaggtataggacttgttggcaaatatgcaggactttatttaaaatctttattccataaagcggatgatagaaccaagagtaacgtgagagttgtgaaggggactactactgcagaatatagaaaaatgtggggtatccaaaacgagtacgaaaagaaatcgcgtgacaatcatgtccatcattgtatagatgctattactattgcctgcatagaaccaggcgaatataatgcaacagcaaaatattatcagcagctggaagagtatgaaagagaaaatgcgcctaagccaacattcccaaagccttggccaacttttactgaagatatcaaagctatagcagatgaaatgcttgtagttcacagtacgccagacaatatgccaaagcatgctcgaaaatatgttttgacatcaaatggtaagaaacttgctaaaggggatgttgcgcgtggttccttacataatgataaatattatggcgcgatagaacatgatggggaaataaggtatgttctccgcaaatcacttcaagaactaaaagagggtgatgtcgaaaatatagtagatgattctgttcgtgaaattattaagaaagccattgcggaaaagggattcaaaagggcgatggaagaagatgtctttatgaataaagaaaaaggcataaagataaaaaaagtacgatgctttacacctacagttactgatcctcttcatattagaactcatagagatgtttcacataaaagttataaacaacaattccatgtgacattggatggtaactattgtatggcaatttatgagggtatatttaaaggaaagacgaagcggtcttatgagataattaatatgttagatgctgcatcatattataaagagagtgcagatttaacaaagttatatccaatcgctccagaagaaaagagtggacttaaatatagatgtttggtacgaacaggaacacagattattctgttacagactgatgatgaggatataaatctcatggataaaaaggagctgactaaacgcatgtactttgttgcagttatgcagaaagacggaagaattgtccttagatataatcaggaagcaagagaggctacaatcttgaaaaaagagcgtaaggccggtgcttataaaataggcgaatcttataggtcagagatatccctatccttatcagattttcatgcattagtagaaggtgctgattttaaaataaatgtgcttggagaaattacattgttaaaataa

SEQ ID NO: 167 - DNA, 3645 bp, unidentified
  misc_feature 1..3645: note = Synthetic sequence or unknown origin
  source 1..3645: mol_type = other DNA
atgggaaagattctgggattggatgtaggcataggttctcttggatgggctgttattgatgaagatcagcatcgcatagttgattttggagtaagaatctttgacagtggcgaagaaggcgcctctaaggcagcagatcgggctagtcaggtcagaagaagatacagatctacaaaaagactaaacaagagacgtaagcagagaaaactgcgactcaaacagtttatcgaggaacaaggtcttatttccgtagaagatatcaatagtgcttataggacgaatgggtttaacccggacgtttggaaactacgtgcagaaggacttgaaagaaaactcgaacccatcgaacttgcatctgttttgatcaacctgtcgaattatcgcggttatcaggacttctatgaagatgcagatgaagaagattccggtaagttatccgaggcaaagaacaaaataaatacaatatataaggagaagggcaaactctataaaaccattggtgagatgatttatcgtgaggaatgtttccgaagcggtcccgatggcatgctgacaattcgtaacaaggccagacgtgaaaatgggaagaaggttacggactataagtatctaatcgatcgtaagtatttatcagaagaactgaagacgctgctgaaatgccaaagagagttcggctatgaacagttaacagatgatgtcatcgatgctttttctgggattatctttacccaaagagactttgaagacggtccgggtccagataagaataaagataagatgcgtcgcgatgctatgatggctgcgctgaaaggtaatcaaacatattccggttttgatgaattggttggcaattgcccgttttatcctgacgagaaacgaggacataaaaactcacagctttatgacatgtatgttatcgtaaattctctctcccagttcaccttctttgatggaaagggtaacgagataaactgtccggagagtatggttctggaaattcgtcaacagctctttgagaaagcaggtgtccttactaagaaagatatagaaactctatgtaaagccaacggtgttaccataaagatccctacagaactaggaaaaaagaagaatttggtaaaggcggagtttatcaagttcctgtctaattctgatatttttcctgtggaatttattcaacgattcaaggaagaaacatttgatgatgaaaacgctctttcagcgaagataggttatatacttgcgaagtttgcaacgccgagacgccggaaagaagaacttcagaaggtactgacccaagaggagtatgagcttctgaaagacggtgacaagataaagacagagaagacaggtggtggagccagtgtttcgttcaaatacatgaaagaggctgttgaagcctacttcgaaggagtgaagtatggagatttccaagccgagtttaataagaagcatcctcaagaagagaagcgggtattcctgtccccggaaggaaaagtgctccccatcacagattcggatatggtaagaaatccggtcgtatacagaagccttaatgaaacgagaaagatcgtaaatgtggttcgtgcgaaatacaaagatgtgaaaacgatcaatatcgaggttgctaaggatgtcggtaaatctttcgaacaacgtaaggagactctgaaatatcaaagagaaaacgaggagaataacgaaaaactccgtatgcagcttattgagaaacttgcagcagagaatatgcaggtgatgcttgcagataagctgattgaacgttttactctatggcaggcccagaagggtaagtgtatgtattcgggtaaagatatctcctttgctgagctggttagtactaccgtcgttcaagtagatcacattattccacagtccatcgttcttgatgagacactgaataataaggtccttgtgtacaccgaagaaaaccagagaaaaaagaataaacttccgctcgaatacatggctgaagatcaggcaacagaattcaaaaaccgagtgaataatctattccgtaccggtaatatctccaggacgaaaaaagagtatctgctattgccatttttggacgatgagaccgttcgaggctttgttgatagaaacatcaacgacaccagaacaatcagtaaatttattgccaattatcttcgtattgcattccaagataaggtaaaggtacaggtcattaaaggagcaattactagtaaattccgtaagagatggttgggaagcaagacgaagagatacggatatgtttcatcaatctatggtcttgagaagaagacgagagacctgcattattaccatcatgccattgatgcggcgattgtagctaatctgactcatccgtatatcgaacttgctcaagactatgtgaagtttgatgccatgatgaaggatattgattatctgcagcggaaggggaatggcagtacagcactgaaactacaggaagaactgattcaagaacaagcaaagacagtcgacaagatgtttaaggtatatggctttaatcgagagtataccaaggaattacttgcctcaggatatgtaccaagtatatgcgaagacttgagaaaagaagtggagattcgtgttcctcttgagatcgagtttgacgcaaaagaatacgctgacatggagaaggcattctacgaactgcgccagcttctcaacgctgtacggtacaacttcaaagatgtggactacgagaacagaagtgatgtagtggatccggatatgctggaggaaatcaatgcaagacttcccatcgtgagacctgacgtagcttgcatgaaatccaatgcacagctggtatttgtagacaagccggtagatgaaaacgctacggcagaagaagttagtaaagaactgacgagttttgtgaagaaactggaacagcgtagcataatggattatatcaagagtattcgtatgctctctgaagaggaatatgcagagcgtgtacacgaatactattctgacaaacaatttgcagatgaaatagaactgccctatgtttctttcaagattgatcgcaaattcagaggaagtatggtggctagtgataatccggtatcgctgggtaaagcaggatataaaacttttaaagaactcgaggaggatatgaagaataatctcaagtgtccatactatgttcgatttaataaaggtatcggcgaaacaggaaacttcactatctacgacgcaagaagctattactgtatggaagtgtatacagatgagaaaggaagctatcagatccgtggaatccggtatgtagatgtgagaaatgaccacaaatcggggaaactcgtcttgttgaaaccacttccggaaggatgcacgcaccatgtatatcttttcaaaaatgaatacatcaaggcatacaagaacgggaaattaagaaataacggttttggtgcatataggggtgtcgaaaacataaatgaatccacaggcaaaatccgactgttttctaatgttaatctgtccggaagaaatacaaaaatccgtttggacggagaaatcaagaaaatcgaaatatctgctcttggacatattatgggtgaacaaaaatgtggagatcaatcattgtttatagcggagaacgacttaacgtaa

SEQ ID NO: 168 - DNA, 3783 bp, unidentified
  misc_feature 1..3783: note = Synthetic sequence or unknown origin
  source 1..3783: mol_type = other DNA
atgaaacggttaggcattgatttgggcaccaattccctcggttgggcggtttttgaggatgaggccatgcgggaggcgcccgttgggtcggaggcgccgaaccccattgcgtgcggggtggtggtgttcccggaggggcttgagcgggacaagagcgacaacctaaagtctccggcggcggagcggcgcgccaagcgtgcggcgcggcggttgattttccgccggcggttgcggaagttccacatgttgcgggcgttgatggagctggggatgtgcccgctgagcgaagaggggttcagggcgtggaaggaggaggggcgttatccgctgaaggatgcggcgttcatggactggctgaagtccacgccggagcacaacccttatgccgatcgtgcggcggcggcagagggcaaggtggatgcgctcaccttggggcgggcactttaccacttggtgcaacggcgcggctttaggagttcacgcaaggagcgggtgcaagagttgctggcggaggtggaggcctccgaggcgaagggcaaaaaggcggtgcgcaagacaaaggccaatgatgaattgggggtggtaaaacaggccatcaaagaccttaccgcggcattggagggggagaagctgacgttggggcaatatttcttccggcggttcgcggcctatgccacggcgctcaaggaggggcgcatggcggaggcggggacgttggcatgcatccgcggacagcggacggggcgtgtggaacactacgaaaaggagtttgaccgtatcgcggaggtgcaggggcttgcgccggagacgcgcgaccgcttgaggcgtatcctcttcttccaacggcctctgcgcattcagcgtcatttggtgggctggtgcacgcttgagaaggggcgcccctatcggacggtggacgccaagggaaacgtgatggaggcgcgtggacacaagtatcgccgttgcttggaggggcacccggattacgagcgcttccgcgcgctggcttttctgaacaatctccgcgtttcggtggcgccggagcaggagggcgaaagcgagcgtttgcggcacggggaggggcgcaccctcaccgcaaacgagcgggaggccttcctcacggcttgtgtccgaaaaacatcgtggaaggtggaggacgccttggcgaaagtcttcgggaagaagacgcatgtgcgctccaatcatcgccccggcgatgaggcccccatgatgccgatgcgtgcggccctggaggcgctcgacatcgcgcctgagcagtgggagcgtgcgctcaatgcgctctatgccttcgatgacgcggataagcttatcgcctgggcgcaaaagcctgtggcggaacatggtttggggttggagacggcaaaggcgcgccgtttcgcgtgcatcgacgcgccgcaggagcgcgccgcctacagtttgcacgccatccggaaaatcctgcccttcctcgaaaaggggtttatgctccgcaaggccatcttctgcgccaaactgccggacttggtgccggactacgcggcgcacgaggccgagctgctggaagggctctccgcgtgcgaagaggcatgggcggaagagcgcgtggtggcacaggcagatcccttgcatcgccggaagccgcgcccgttggagagtggccattaccgggactatctgcgggagcggtggggcgtgaacgcggtggccttcgcgcaactttacgtggatacagcccagccggacaaggaaaatccggtgttgccgcccgtggacctcaacgccatccgcaacccgctcgtgaatcgcgccctcaccgtcttgcgccggctggtcaatacgttgcgcagggaggggacgattgacgcggatacgcacatcttcatcgagttggcacgcaacgtcaacaacgccaatgcgtgccgcgccatcgagcgttggcaaaagcaacggcaggaggcgcgggagcgtgcacggcagttcttgcgggaccatggggccaacgccaacgatgaagccctcatcctcaagcacatcctctgggaggagcaagagagaaaaagcgtgtacaccggccagcccatcccgcaagaggccatcaccagcgcggattacgaaatcgagcacaccatcccgcgttcacgcagcggcaccagcgaactgtggaacctcacgctttgcgaacggcattacaacgtggacatcaaggggggaaggctccccatggagtgccccaatgccgagcgggagtggcgcgaccccgcgcaccccgacgcgccttatcccgcgctcgcgcaaagcgcgcccctcgtggcgtgggaggacaagcggaaggagttggagagcaaactctcgaaaaagcccatgcgtgggaacgacccggcggcctacgcaaaaaggcgtcaggactggttgctcacaaaactggagcgcgactactgggcgaaaaaggtcagcacgttccacatcacggcggaggaggtcgaggcgcaaggtttcattccccgccagttggtggataccggcatcatgaccaagtatgccgtccgcttcctgaagacccgctacgacaaggtcttcgcgcgcaatggcgcggccaccgccaccgcgcgaaaattgtggggcattcagcaagagagcgaggagaagtcgcgcgccaaccacatccaccacgccgtggatgcctgcgtcatcgccgcgctcgaccaaaccaccttcaccgccctctgcacacagcttaagcagggcgacacggtggacacctgggcgcgaacgctcccgccgccgatacccgacttcgcctcgcgcgtccaccaagccaccgaagccatcctcatccgccacctccccgccaaccggcaagtgcgccccatcgggaaaaagtccacgcgcctccccgaagaggtccttcaccgactgcaaaaggaagggcgaaccgccccgcgtgccggaaagtccgatgccgtccgcggaagcctccacaacgacacgctctacggccgcatccgcgtggacggcgaggagaaaaccgttctccgcaaaggtctcaaggaaacgttcgagggaaaactcaagaaggaggccctcacggccaaagatattgcgaacgccttgcaggatatggtggacaaggggcttagggaagccctcgccaagcaaatcgctgcctatcttcaggcgggcttgtccgccaaggaattgccggacaagcctttcttcgcccccaatggccttcccgtcaagtccgtgcggatgctctgctacaagcccaagaaccccgatcccatccgtgtgccacacccggagttgccgccgacctacggttccggaagtgacgccctctatctttccgtgcgggaaaacagtaagaccgggaaactggaaagctcctacgtcaccttgctccaaacggtgaaagacccagcctccgtggttttccaaaacgagaaatttcgcatctatccctcccagttggctctggcctacgagcactcccccgaagaactccgcaccctcaccccacaacgcctctccaagcggttgtacgtggtgacgcaagtagaatacacctttttcatctatcttaacttccatcaagaagcgcgcaagcaaaaactcctgaaagaagaacgcaagcttgccggcctttcagagacaacaggtgaaatcgattacattcacggaaccccacgattacatttgtcccaaaaagcatttcttgagcacctcctcttcgagaatgttcacttccggctgacgctggatggccgactggagtggttgtaa

SEQ ID NO: 169 - DNA, 3936 bp, unidentified
  misc_feature 1..3936: note = Synthetic sequence or unknown origin
  source 1..3936: mol_type = other DNA
gtgaaagaaaatgaagaatataatataggattagacataggtacagcttctgtaggatggtgtgtgacagatttaaataataatgtattaaaaattaaaggaaaaaatatgtggggttctcgaatttttgaagaagctcaaactgcagccgaaagaagaaattttagaagtgctagaagaaggctaacaagaagaaaagaaagaattaatattttacaagatttaatgagagaagatattgaaaaagaatattctaattttttacctagattaaaagaaacatctttaaaatatgaagataaaatttttagtaattcaaaatataatcttttttctgataataatagacatgagatttcatattatgaagaatttcctacaatatatcatttaagaaataagttaataaaagaagaaaataaagtggatataagattagtttatttagcaatacatcatataataaagtatagaggaaattttctatatgatggagatttttcaaatgatacaagcaaagtagatgataatcttgaaattatactagaatttttaaatcaaaattatcaaattgaattaaaaagtaaagatgatcttaaaaatattttattgtcaaaaaatttgtctaaagctcaaaagaaagatgagctaatggcatgctttaattttgtgtcatcagataaaacaattattaccaatattataaatgctatattaggttattcatttgaaataaataaaatttttgattgcgatttggaaaagtcaaaaataaaattttcaaatgaaatagataatgaagaagaaatagaaaattcgttagaaagtaatattgatatttattatgctttaaaagatttatatagttggtatatattacaagatattatgagtaattgtaattacatatctgagtcttttatgaaaagatatgaaaaatttaaagaagatttaaaactattaaagaaaatttataaagaatattttcccaatcaatatgatgaaatgttcaaagtaaaaggaaaaaataattttgtaaattatataggaaaaaataaaggggaaaaatttggaaaatgtgatccagaagatttttttaagatgttaaaatctaagataaaagaactaccagatacttgtacttataaagaacaaatagagttagatttgcaaaacgatgatttcttaagaaaattaaacattattgataatggggcaataccatatcaattacataaaaatgaattaagtattataataaaaaatcaatcaaaatattataatacattaaaagaaaatggtgagaaaataatttcattattagaatttagaattccatattatgtaggtcctttagcaaatgataaatttaataaatggaattgggtggttagaaataacgaaaatgaaaaaattagaccttggaatttttctgaaataataaatgaagaggaaactgcagaaaaatttataaatagaatgactaataaatgtacatatttattgaatgaaaaagtaatgcctaaagaatctttattatattctaaattttgtgttttaaacgaattaaataatataagaataaatgaaaaacatatacctagagatttgaaaaagaaaattgttgataaattgtttaaacaaaataaaaaagttactatagatatgtttaaagaactttgtaaaatagaaggacttccagagtgcgacataattggtatccaagatggaaaaaattttatgtctaatatgtcttcttatatggatatgagtaaaatctttggaaaagtagatgaaaataattatgatatgtgcgaaactttaatttattggataactatatttgaagataaaaagatattgaaaaagaaaataaaagctacttattctactattaccgaagaacaattaaataaattattaaaattaaaatatagtggatggtcaagattatctaaaaaattattagtagggttaaaatctaatgactatgaaacaattatggataaattagaaaaaacttctatgaattttatgcagataataaataataaaaattttggatttgataaaaaaataaatgatttagcaccagtaattgataagaatattacatataaagatgttagtgaaatcccaacttcgccagcaaataaaagaggaatatggcaagctatttgtgtggtaaaagaaattactaaagtgatgaatgctgaacctaaaaatatatttattgaatttgcaagaagtgaagaatttaataaaaatatgagtcaaaaaagagcaaaaaaacttttaaaaatatacgataatatacaagatgaattagctacattgaaagaatatgattcaaatgtttatgaaaaattaaaagaaaataaatcaaataaagatttttctgaaagaatgcagttatattttatgcaattaggaaaatgtttatatagtggagagccattaaatattgaagatttaaatttatatgaagtagatcatatattgccacaagcatatataaaagatgatagcattgataataaagcattagttaaaagaatcgaaaatcaaactaaaaaggataacttattattatcagataagattattaataatatgtctggatattggaaaaaattgcttgatttaggattgattactaaagaaaaatatttaagattaacaaaaagaaaaatatttgaaaatgattatgaacaagaaaattttgttaaaagacaattggttgaaaccagacaaataactaagtatgttactaatttattgaaaaacagttatacaaatactgatatatttactattagagcagagttaacacatgcatttagagaagaatttggaatttataaaaatagaaatgtaaataattaccatcatgctcatgatgcatatattatttcaataattggtaatgtaatgaatacatatattagaaacaatgaagaatttaaatatggtgattttgtaaaaaaatatttaaaagagaacaaaaataaggctgaaaaaaatggtatgataataggaagtattaagaaaaacatagatataggaaatattaaaaaagttttttattataaagattgtttcatatctaggatgttgatagaaggaactggtgcattttatgatcaaactttatatagtccaaaaattaataagaataaattaatatcattaaaagatgacaaagattctacaaaatatggaggatactctggagaaaagaaggcatatttttctatattggaatatattaatgaaaatggtttgaaagaatataaattattaggaattccaataaaagttgcttatgatataaaagcaaaaaaatatagtgaagaagagtatataaagaaagttttctttaaaaataatgatattacagaattaaaagtaataaagaaaaaagtattgaaaaatcaacaatatttagatgaaaataaagaagtaatgagattttgcagtgatagtgagattagggtagataaagaattagttttaaattataagatgaatgagttaatttaccttatgaatatgaaagaaaatcaattaaaagataatgaaaaagatttgttaaataataattttgaatatatgtttgattatttattagaaaagataaaaactgaatataaagtattctcttctatatataaaaaattattagataaaaaagaacaatatatgttattagaaaatgaagataaaaaatgtgttattaatggattagttgatttgatgaaaaatggacaaggaaatctaaaaaaggttggtttaactgaaagagaaggaagaaaaagtaaacaaaattttgatactaaaagattaactaatatgatttttatagataaatctgttacaggaatatatgaaagaaggataaatatatatgggatggagaacagtagtagtaaataa

SEQ ID NO: 170 - DNA, 3948 bp, unidentified
  misc_feature 1..3948: note = Synthetic sequence or unknown origin
  source 1..3948: mol_type = other DNA
gtggaaactcaaaacaaatataatattggattagacataggagttggttcagttggatggtgcgttacagatgaaaacggaaaaatgctaaagaaagggaaccgaaacttatggggttctcgaatttttaatgaggcaaatccggcacaacaaacgagaatatttagaggggcgagaagaaggctggatagaagaaaagaaagaattcgttttttacaatctatgttacaagaggatattgaaaaagaatatccaaatttttttccaatgctaagagagagttcattagactttgaagacaaaatgacagcaatgagtatttcaaataaaaaatacaatttattttcagatacaactatgacagatacaaaatactataaagaatttccaactatttatcacctaagaaaatatttagtagatactgatgagaaagtagatatccgactagtgtatctagctattcatcatatcttaaaatatagaggaaatttcttgtatgaaggagatttttcaaataatgcacaagaaatagaagaaaaattagatattatatgtgatttcttagaagatagatacgaaatcacattaaattgtaataaacaagaaattatagacatttttcaagaaaaaaacattgctaaaacagaaaagaaagaaaaactaatgaaatgttttaacttcgaaaaaagtgaaaaaccaatcatagaaaatataatgaaatcatttctagggctgcaattcgatctaaataaaatttttgaaatcgaaatagaaaaatcaaaaatgtcttttgcaaaagaattagaagacgaagtagaaacagaaataaaaaaacaactacaagacaatctgccaatttatgaagcaatgaatgatatatacagttgggtaactttgcaagacatattaaaaggaaaacaatatatatcagaggcgtttatcgaaaaatataataaatatcaagaagacttaaaattactaaaaagggtttataaagaatattttccaaagcaatatagtgagatgttccgaaagtacaacgaaaaaaataaaacaaattatgtagcatataacaagaagaataatggaaaaacaaataaaaaatgcaaaccagaagaatttttggcaatattaaagaagaaaatagatgaattaccagatgcttgtgtagaaaaagaaaagataaagaaagaaatagaagataataactttctacaaaaattaaatgtaacagaaaatggcgcaattcctcatcaattgcatcaaaaagaattaaatgttattttagaacatcagtcgaaatactataaaacaatacaggagaataaagagaatattgataaactattctgtttccgcattccatactatgttggcccattagcaaaaaaagagggaaaatggtcatggatagttagaaaagaagaaggcaatattcgcccatggaattttgggaacattgttgatgtagataaaacagctgaagcatttattaaaagaatgactaataaatgtagctatttaccacaagaagatgttattccaaaacaatctttgctatatgcaaaatattgtgtcttaaatgaattaaacaacattagagttaatgaaaaacatattgcaaaagatatgaaaaggaaaataatcgaaaaattatttcaagaaagaaaaaaagtaacaaaaaaagcattgaaagatttctacaaaaaagaaggctttatggtagaacgaatagatggtttgcaagataatgagaatttcatgtctaatatggaatcctatattgatatgacaaaaatacttggaacagtgagtgaagacaactatgaaatgtgtgaaaagataatcgaatggattacaatttttgaagataagaaaatattaaaaacaaaagtaaaaaaggaatatccagaacttacaaatgaacaaattacgaaattagcaaaacttaactatactggatggtccaaattatcaaagcattttctaactggattgaaagcacaagatggtgaaacaattatggataagctagaaaatacaacaatgaatcttatgcaaattatcaattcagataagtttaattatgcagaacaaatcgaaaaagcaataccaaagaaaacggggaaaattacctatgaagatgtagcagaaattccaacatccccagccaataaaagaggaatatggcaaaccatatgtgttgttaatgagttagtaaaagtaatgaagggagaaccggaaaatatttatattgaatttgcaagaagtgaggatgtaaaaaaacaacgcaaagatagtagaaaagaccagttgttaaagaagtataaagaaattgaagcgcaggcaacagaattaaaagaatatgatcctaaagtatataaacaattaaaagcagaccaaaatgataagaaccttacagagaaaatgtatttatactatatccaaaatggaaaatgtttatacagtagaagaccattaaaccttgatgagctagataaatatgaagtagaccatatactgccacaatcttatataaaagacgatggtattgaaaataaagcattagtaattaaagaacaaaaccaaagaaaaaaagatagtttgctattatcggatactatcataaataatcaaatagaatggtggaaagatttgttagataaaggtctaataggaacaggaaaatattatcgacttatccgaagaaagatgcttgaaacggactatgataaagaaaaatttgtacaaagacaactggttgaaacaagacaaattacgaaatatgtaacgaatttattaaaaagttcctatgaagatacggaaatttatgcaataagggcagaattaacccataatttcagagaagactataaaatttacaaaaatagaaatgtaaacaattatcatcatgcccatgatgcttatattttaagtacaattggaaatattattgcaaaacattggaaagtaaaggaaaattttcaatatggagaatatgtaaaaaagtatttgcaagatgaaaaaagcaagtatgaaaaaaatggtatgataatgggaatgattagaaagaatgtggatatagcagaagttaagaaagcaatggaatataaagactgctatattagtagaaaactagaagagggaacaggaccattttataaacaaaccctatatagcccaaaagaaaaaccagttatttccttaaaacaaggaaaagcacctcaaaagtatggtggctattctggagaaaataaagcatatttatgtatttatggatatcaagataaaaaaggaaatcaacaatacaaactaatcggaatcccaatacaggtttcatatcaaattaaagctggtaaagaaacattagaaaattatattatagaaacagaaatgaaagataaacaatatagtcaacttaaaattataaaggacaagattttaatcaatcaagaatatctagatgaaaataatgagccgatgagattttgtagtgattcagagattagaaccaataaagaattgcaagtcaataataagataacagagttcatctatttaatgaatttagacaagaaaaaactttcggatgaacaaattgaaatattagaaaacggctatacagatacttttgaatatttactagaaaaattaaaacaagaatacaaatcacaaagaacagtctacgaaaaggtattaaaaaagaaggacgagtttgaaaaactagaaagtgatagtaaaaaaattgttattaatgaaactatcaacctaatggaagaaggtataggaaattttaaaaccatagagttaagtactatgttgggcagaaaaaatggaaaatcttttgaaacagatagtttattacaaatgacattcatagataaatctattacaggaatatacgaaagaaggttcaaaataaattgggatggagaacagttatag

SEQ ID NO: 171 - DNA, 3954 bp, unidentified
  misc_feature 1..3954: note = Synthetic sequence or unknown origin
  source 1..3954: mol_type = other DNA
atgaaaagtcaaaaagattattacataggtctcgatgttggtacggattcagtaggttgggcggtaactgatacggactacaatatcttgaagtttaagggtaacgcacaatggggaattcgtcttttagatgaaagtaatacagcagaagaaagacgtgcattcagatcatcaaggcgtagaacacagagaaataaattcagggtacagtgtctcgaattgttgtttaacaaagaaatatcaaaaaaagatgtcgctttttatcaaagattgcacgatagtaatctttgggaagaagataaaaatgttgcgggaaaatattcactgtttaatgacgaggggtttaccgataaagattattataagctttatccaacgatttatcacttgagaaaaaaacttgttgaaagccaagcaccagttgatatcagattattatttcttgctgtaagtcatattgtaaaaaatcgtggtcatttcctttttgattctgattcattaggaaataattcggttccgtcttttaacgaggtttggcgcgagttagcagtttatattgctgatgaatttaatgttgaattggaatgcaaggatatttgtgtaataggtgatattttaaaaaataaaaatttgtctattactacgaaaaaaacaatgttactgaatgagttttcggttgcgaaaaaagaggaaccggctaattctattattacacttttagcaggtggaaccgcaaattctgctgatttgttttctaatgaagagttaaaaaattcagaagcatctaaaattactttttcaagcggttatgatgaaaaagtaactgtttacgaatcagttttcggtgatggatttgagttattagaaaaaatgaaagcagtttatgactgggctattctcgctgatattttaaataatcaaaaatacatttcttttgctaaatgtgagatttatgacaaacataaaaaggatttgaaaatgctaaaagaatatgtaaatgcatatatacctgaaaaatacaatttgatattcaatgaaaataaaagtggtacatttaattatcttgcatattcaggttactcgaagaaaaatcctgtagagaaaaaatgtcaacaacaagattttttggattttttaaaaaaacaattacccaaagatgcgaaaaataaaaaatacgaacagatgtattctgaaattgcattaggtacatttatgcctaaaatcattagtaaagataatgcagttataccaatgcaagtaaacaaggctgaactaatggtgatattagaaaatgcttctaattattttccgttcttaaatgaaaaagatcttgacggaaaaagtgttaaagataagatattagatgttttttcttttagaattccatattatgtaggtcctttgaataagcatagtgataaagcatggttagaaagaacaaacgagaaaatttttccttggaatttcggaaatgtagtaaatgttgataaaagtgcagagaagtttattgaaaatttaacaagcaaatgtacctatattttaaaagcagatgttttacctaaaaactcattattgtatagtaaatttgctgttttaaacgaactaaataatttgaaaatagatggcgaaaaaatacctgttgatttgaaacaaaagatttttattgagttattcgagaaaaataatcgggtaacatcagctcgtttgaagaagtatttaaaatcctatggtgttgaaggcgaaataacaggtatagatggagattttaaaaattcactaaaatcatatcgtgatttaaaagggtttgaattaacagaaagtgaaaaagaggaagtaattaaagcaataacaatttttggtgatgataaaggtcttttgaaaagacgtttgaacactctttttggtgaaaaactttctaaagaagatattgctaaaataagtaaattaaaatattctggttggggaagactctcaaaagaatttttaaatgaaattcagggagcatgtgcagaaacaggggaagtgaatagtgttataggatttatgtgggaaactaacaataatctgatgcaattattaagtaatgagtatggttttattaaagcaattgatgaagcaaacggcgaaatgcaatttacatctttgaaaaaagagattgaggctctttatgtttcaccaaaggttaaaagacccatttatcaagcaatgaaaattgtggaagagttggttaaaattaacggttgtacaccgaaaaagatttttgtcgaagtggcacgaggtgccgaggaaaagaaacatactgtatcaagaaaaaatagacttcttgagctttataaatcttgcaagaaagataatgaggagctttataatgcaattgctgataccgatgaggatgaattcagacgagatgcattatatctttactatacacagtttggtaagtgtatgtacactggtaaatctattcctttatcagaaatttataataagcacctttatgatatagaccatattttcccacaatctaaactcaaagatgatagtttagataatagagtgttggttacgaaaaaatcaaatgaagataagggcaatatttatcctatagctcaaagcataagagaagaacgtgcagctttctggaaaatgcttttagataaagggttaataagtcttaaaaaatacgaaagacttgtgagaaatagcccacttacagatgatgagttgacatcatttataaatcgtcagcttgttgaaacaagacagtccacgaaggcaatatcacaacttttaagcaaacgatatgaatcagaaattgtatatgtaaaagctggcttggtttctgacttcagaaaaaaatatgattttataaaatgtcgtgaaattaacgattttcatcatgcaaaagatgcatatcttaatatagttgttggtaatgtatataacacaagattcaatcataacaggcttgcatttatttcaaaattacaatctggtgaagttagtcttaacggaatgttcaattatgacacaacaggagcatgggtagcttttggtactaataagtcaattgacacagtaaaaaatactatgtcaaaaaacaacataagatttactcgttatgcctttaagcaaaaaggcgggttgtttaaacagaatattttgaaaaaagggaatggacaagtacctgtaaaagcaaattctgcacttagtgatattaataaatatggtggttatgataaagcaatatcaacttgcttttcattggtttcttatgtgaacgataaaggcgaaaaggtaaaacaatttgttcctatcgatttacatgaagaaaataaatacttacaaaacaccaaaaaatttattgatgaaaaactttctgtcgattcaactataattattccgtgtataaaatacaatacacttataagtattgatggcttcaggatgcacttaagtgctaaaagtggcgattctcaaataatatgtaaaccaggaatgcaacttgttttagacaatacttctgaaaattatataaagaaaatagttaattatctaaataagtgtgcagagttgaaatgtgaaaaaacaataactgtttttgatgggataagttttgatttaaatatgcaagtttatgatgctttgtcagttaaacttaataatacagtgttaaatgtgaaatttgctaatacagcaaatgttataaagaaaagaaaagatgtatttaaagaactttctttgagagaacagtgtgttgtattaatgcaattgttgagtattttgcattcaaatgctagtttaggcgatttgactttgatatgcgaatcaaaacaaagcggacgtgtatcaataaatagcaaaattatcccaaacaaaacagctaaatctattaaaataataaaccagtcaattaccggtttgtttgagcaagaaatagaattattagattaa

SEQ ID NO: 172 - DNA, 3957 bp, unidentified
  misc_feature 1..3957: note = Synthetic sequence or unknown origin
  source 1..3957: mol_type = other DNA
atgaagcagaacggaaatcacgccgccataggtgactactacatcgggctggatgtcggcaccacctccgtcggttgggcggtcaccgataagcagtacaacatttctaagttcaaaggaaacgccatgtggggcgcacgcctttttgacgaggctcagccggcagcggcacggcgctcaagccgcaccgcaagacggagactggcaaggcgcaagcagcgcctgctgcttcttgagatgctttttgccgaggagctcaacaaggtcgatgaaagctttcttatgagaatgagcgaaagcgcactttggccggaggacaagtccgacacctgcccgttcagcctgttcggcggcagggattacaccgacaaggactatcaccggcagtatcccacggtgtatcacctgcgcaatgagctcgtgcattccgccgagctgcacgacataaggctcgtgtacctcgccctgcaccacatcatgaaaagccgtggacattttctgtacgcagactcaaacgacggcgaggccatctcagttgaggctgctctgtcggagttttccgagttcgttttcgccgaatacggcattagctttgagcctgcgcatagggaggattttatagcgcagcttataagcggggtgggagtaacggcaaagaagaagctcctcaaggctgcggcggatataaaagctgatgatgaggccgagataagcacgacggcacttcttgaccttctggcgggagcaacggtcaagctcagtgagctgtaccgtgacgaggagctcaagagcgctgagataaaaagtgtatgcttgaaaaatgacttggacgaggtgtttgacgagctaagcgagcttctgggcgacagagtagagctgataccgcaggcaaagcggctttttgatactgcccgcctgtcgtcgatgctgaacggccacaagtacataagcgaagccaaggtggagttatacgagcagaacaaggctgacctcaagcttttaaaaagctatgtcagaaaggccgcacccgagcagtataagcacattttctccgaaaagtcggataagcttgcaaactacgccgcatacaccgacggcgagtgcaagcaggaggacttctgcaagttcctgaagtctgtgctccccgagccggacgacggcgaccccgaagtgcagcggatatatgctcggataaaggatgggacgctccttacgaggctcaagggcagcgacaacggcgttatcccttatcagctccacaaaaacgagctcacggaaattttgaaaaacgccgagcgctacctgccatttctcaaggaaacggacgaagcggggctgagtgtctcggataagatcatcaagacatttgaatttaggctgccgtactatgtcgggccactgaatccggtatctccgaacggttgggcggtgcgctttcccgagcacacgggagagaaggtgtacccgtggaattttgaaaaagtcatcgatacggaagcgtccgcagcgggctttatagaaaatctcatcggcaggtgcacctacaccggcgagaaggtgttgcccaaagactcgctgctgtacagcgaatatgcgctgcttaacgagatgaacctgctgcgcatcgacggcaagcctctgccgattgaggactatcgcaggctgttggacgagcttttctataagtcaaagaaaaaggtcaccaaaaagcgcattcgcagctacctgctggccgaggggctgatagaagaggcggcggtcatcagcggagttgacgataatataaagtcctcgctcaagtcgtatcacgactttaagagcatcctcgagcgaacgggcgatgccgacatggtcgaggatatcatccgcagcatactcattttcggcgacgacaagaagatgctcagaagatggcttagcagaagcacccacgacctcacggacgacgacattaaatatatctgccgccttaaatacagcgactggggcaggctgtcaaaggtgtttctcaccggcatatacagccccgacgaatggggcgaggcaaaaagcatcatggattggctgcgcctcggcgagcgcaatctcatgcagctcatgagcaatgattttgagtttgcggcacatgcggcggagcatgcagctgagcttttcggcaccgaccgcacgctcggcgataagctcgacgacctgtacatcgcaccgtcggtgcggcgcagcatccgccagactctgcgcatagtcgacgagatcgtggatatcaaaaagtccgttcccgaaaagatattcatcgaggtggcaagggaaaatgccgacgaaatgaatcgcaagcgcaccgaaagccgtaaagatcagcttattacgctgtacaaaagctgcaaggaggacagcggtgagcttttcgagcgtttggaaaacgaggatgagaattcccttcgcagcgacaagctgttcttatattacacgcagctcggcaggtgcatgtattccggcgagcctatagacttcggcgcactgtctcgtggcgaaatgtacgacatcgaccacatcttcccacagtcaaaggtcaaggacaacagcattgataaccgtgtcctcgtcaaaaacggctataaccgcgaaaagacgaacatttatcccataaacgaaagcatccgcacgaaaatgcgccccatgtgggatcacatgaaaaagtataagcttatctcgcagaaaaaatatgatcggctcatccgctcgttcccactgaccgatgcggagcttgaggcatttgttgcccgccagcttgtggagacaaggcagtcgaccaaggcgctcgccggtctgctcaaggatatcttgggcgagaaggttcgcatagtatattcaaaggcgggcaatgtgtccgacttcagacacgacagcgactttataaaatgcagggaggtcaacgacctgcatcacgctaaggatgcatacctgaacatcgtcgtcggcaatgtgtacgacacaaggtttacaaagcggtttttcgcaaacatccgaaacgagaactacagtctgaacaaggtctttgctttcgatacaaaggatgcatgggacacaaagacctccatggcaacggtcaagaagtacatggcgaaaaacaatgtcatcgtgacccgcatgcccagagaggtcaagggacagctgtttgacctgcagctaatgcccgccggtaaggggcagctcgagaaaaagagcggcctgccgatagataaatacggcggctacaacaagctctcgggcgcatacttctgtcttgtcgagcatacggaaaagaaaaaacggataagaacgctcgaacccgtgtatgtgtataaaaagcagcagtttgaagccgatcccgaggagtattgccgtcagacgctcggcctgacggagccgaaggtgatagtcaacagaatactcattgactctctgctcgaactgaacgggcagcgtctgtatgtgaacggacgaacgggagagagactgatttttaagcactcatatcagcttacgctcggctatgagtgggagaagtacataaagcagctgcaaaagtattccgaacgatgctatgcaagaaggaccgaacttccgctgacagaccatgatggcattaccagggacaaaaacgaggagctttacggcctgttcatagaaaagtgcaggcaaaaggtctacgccgagcttttcggcaatatgcgtgcggatatggagaagcatcatgagaagttttccgccatgtccgagctaggtcaagtcaatctgctgctcgaggtgctcaaagcgttcaggtgtaatgcgcagaaggccgatttcaccaacctatgcggaaaaggctctgttggcatattggtcaaatccaaggcagtttcaaaactggacagcgcatatctcgtcaaccgctccgtgaccggcctttacgagacaaaggtcgacttgctcaaataa

SEQ ID NO: 173 - DNA, 4185 bp, unidentified
  misc_feature 1..4185: note = Synthetic sequence or unknown origin
  source 1..4185: mol_type = other DNA
atgagcgacaaaagtaaaaaatactttatcgggttagacctcggcacaaattcggtcggctacgccgtcgtggacaaggactgcaaggtcgtgcgcaaatcgggaaagagaatgtggggaagcgttttgtttgacgaaggacaagccgccgcttccacgcgcgttcaacgtagttcgagacgaagattcgaaagaagaaaagagcgaatacggcttttgcaaagcttgacggcgaaaagcgttacggaagttgacccgtcgtttttcgctcggcttgaaaggtcgtttttgttaaacgcggaaaaggacaacgagttcgggcgcgacaatatttttaatcttttcgacggcgaatacaccgaccgcaattattacgccgattacaaaacgatttatcacttgcgcaagagattgtgtgaggacaagagccaagccgatattcggctcgtttaccttgcccttcatcacatgataaagtaccgcgggaattttttgcacgacgaggagcgtttgcaagcgggtagcgaggatttagcaaaaagtatcgaagagtttttcgaagcctattacgataagttccccgacgaggacgaagaaacgggcgagattataggacatgcggatatccccgccgaagaattagccgacattttgaaaagcaaaggcaaaaagtcggagaaaaaagacgatataatcaaaaagatatgtgctaacgataactcattaaagaaaaaggcttccgcgttcgcttcgcttctgctcggctacaaagccaacttagccgaccttttcacgattggaagcggcgacgaggacaaagcaaaggatgtgaaaatatctttcgacggagcggactatgacgaaaaggcggagagcttccccgagcttttcggcgacgacggcgcggagcttatcggcgttttaaaaaagatatattccgaccttacgctttcggcgattatcggcgagggcaaaaagtacgtttacgaaggaatgattgaacgctacgaaaagaacaaaaaagaccttttaatgctaaaaaccgtcctaaaagccgacgagcggatatacaacgaattttttaaagaaagcaacgagaaaaaggttagcttcgtttcttattttaagccgcacgtgcgcggaaaacaaaacgaaataggcaagcgcgcaagcaaagacgacttttataaggcggttaaaaatcttttgggtagcgataaattccccgattcggaagcgaaaagttacgttctttcgcgcatagaagaggacgactttttgataaagctcaattccacgcgcaacgccgttattccgtatcaactcaacctcaacgaaatggaaattatccttgacaatcaaggcgtttactatcccgaattagctgaaaatcgcgacaaaataataagtttacttaccttccgccgtccgtattccgtcggcgttatcaagcccgaaagccgtttcgcctgggttgaaaaggcggacgtgaaagacgagcgcgcgtacccgtggaactttgaagaagttgtcgattacgattccgcttcggaaaaattcataaaaaacttgacgggcagatgcacttattttaaggacgaatacgttttgcccgcaaattccgttatttatcaagcgtataacgttttgaacgagcttgcgaatgtgagaattattttgtcggagggtggcgaaaggcggctcaccgtcggtgaaaaacaaaggtgctttaagttgttccttgataattcgaccgtaaaaacaaaagatataacgagcgaactttttaaagcgttcagagtagattcgaaaggtttgaccgggcttggcggcgacggcaaaaagtttttgagtaaaatgacggggtaccgcgcgataaaaacggctttaaaaatcgactgtttcgttgaagaaaacggcaaaattcaaacgaattacgaacttttcgagctttacgaaaaaatcgcggaaatactcaccgtgttcaacgattgcaagataaaacgccgcgcgctcgaaaaacttttcggcgaaaaattcccgaaagccgcgatagatttgctcgttaaacaaaattttgtcggctggggcagactttcccataagtgcctttgcaaagcggaaggcgcgaacggcttgaacgtgcttgaaactatgtattcgacggataaaaactttatgagcgttatatccgacgaaactctcggtttcaaggagattttcgatcaaaaaaccgacgaaaactcgggcgaaatcaagtattctcaaatcaacgaattgtatatttcgccgtcggtaaagcgcaccgtatggcaagcggtgaaagtcgtgaaagaagtagtaaaagccgtcgggtgtgaaccgtgcggaatttacgttgaatcgacgcggcaagacgacaagaaaaaggttacgaaaacgcgcgctgaaaagttgaaagaactttacgaaaaagtgcgcaaggataccgacgaatacaataaaggattttacgaaaaatcggtgggcgacaatctaaaaacaatgagcgacgataagctcaacgacgacatggtttacctttatatgttgcagatgggtaaaagcatgtactcgggcaaatcgcttgacttaaagaatttaagcacgacttgcgaaatcgaccatattgtcccgcgccattacataaaagacgatagttttgaaaaccgcgtgcttgttttaaagcaagaaaatcaagaaaaatcgggtacgctcgcgttaaaaaagagcgttcgcgacgaaatgactcctttctggatgttcctaaaaagcaagggatttatcggcaaaaagaagtttgggaacttgacaaaatcggaatacaccgaaaaagatatgacgggctttataaaccgccaactcgtcgaaacaaaccaaagcatgaaagccgtgcgcgaccttttaaaaagccgttattcctcttccgacgtggaattcataaaggcgggtatctcgtccgcgttccgctcggcgcatacgcaaaaaggctacgttgagttttttaaacttagggaattgaatgatttccaccacgcaaaggacgcttatcttgccgccgtaatcggctattttacgcgcaaaatttacccgatttggggcgcaaacgaccagtcgagaatattgcgcgacgaaatagaatcttccgccggcagagatatttccgagcttcgcgaaaaacgctacggcattgttgttgactctatgatttacgcaacccccgaccgtgacgacgacgttatctggaacacttgttacaacaatattttgtctgcgtttttaaacaacgactgccttgtcacgcgaaaaaaagaggaagcaagcgcgcagttttataaagctaccatttacagacttcgcgcggaaaaaggtgttaatttgcgttatgccgttactcgtagcggcgaaaagaagcctttaccgttaaattacggcaattatgacggcgaaagcgacgcttattttgtgcttgcgaccgtgcaaaaaggcaaaaagacggaaacggttctcacgggcgttcccgttcgtatcgcataccttgcgaaaaagaacgaaaccgccgtcgacgattacttgaaaagctatttcgaagctaataaaaaggtttacgtttcgcatgacaaacgcagaattttgaagtatcaacttatccgttacaacgggcaactttgctacataaccgccgcaacggaagttataaacgccgagcagcttattatggataaaaggtattcgttgctcctgtactgcatagcgcacccgaacaaaaaagtgacggttaaagacaacgtttataggcttacggcagtcgaaaacggagagtattttacgaatttgatgaaagagtttgtaaaagcttacgcggaaaaactcaacgaacgctaccctttgtatgcaaaatacgccgacggagccgtcgcttacgttgagtccgaaaaatttgccacattgcctttatacgccgaaaaggaagcttgcaaagcggcgtatattctcaacttgcttaatttgacgaaagccggtagtacgcaacttgatatgagaaaatacgatggtagtacaagttggggaagattaggcggcaaaacaatccgcaaagacgaggtcgactggatagacacttctatcacgggcatttatcgtacggaaataaagggggagcagtaa

SEQ ID NO: 174 - DNA, 3966 bp, unidentified
  misc_feature 1..3966: note = Synthetic sequence or unknown origin
  source 1..3966: mol_type = other DNA
atgaaaaataatggaaataatttaaaaacaggagattactatatcggtctggatataggtacaaattctgttggatgggcagtaaccgacgaagagtataacgtgcaaaggtttaaaggaaacagtatgtggggtgtacgactttttgaagaagcatccggtgctgccgaaagaagaagctcacgtgctgcaagacgtcgtcttgcaaggagaaaacaacgtatgcttatactggagcttttgttttctgaggaaattgcaaaagttgacccaaacttttttgtaagattaagagaaagctttttgaaaacagatgacagaagtacagacgccagatactccctgtttaatgataaaaattacacagacaaggattatctgaagcagtttccaactatttaccatttaagaagcgaactaatacattcaaaagaaaagcatgatataaggcttgtgtatctggcacttcaccacataatgaaaaaaagaggacactttctttatgaagctgacggaaatgttaccgaaaaaagccttgtggaatatattgacgaattaaactatttcttaagcagtgaatacggatacgagcttgattttgaagacaaagaaaaatacgcactggttcttgaaaagaatgatataaatgttacccaaaagaaaaaattgttaagagaaaaacttggtgcacagcaggaacagcaagaatataatcctcttgttctttcagatttacttgccggtgcaacagtaaaattttcagatttattctgtgatgatgaattgaaaaacacagaagtaaaaagtattagtctgaaaaatgatattgatgcagtatttgagtcattaacagctgctattggggaaaggattgaacttatactaaattgtaaaatagtcttcgatgctgcaagactttctcagattcttggcggaaacacatatataagcgatgccaaaatacaactttataataagaataaaaatgaccttgcaaaattaaaggaatatataaaaactaattatccccaaaaatacaaagaagtattcacaacgaaaaaagataaacttaataactatgtagcatatagcaaaaacaagctaagaagcggagattattgttgtagtcaggaaagtttctgtaaatacctgatttcacaatttccggagatgaaaaacacgcaaggttatgaaaatatgtgctttgaaatagaaaacagcacattcttgtcgccgcttacaggaacatccaacagcgttatcccacatcaattaaatctttcagaacttgaaaagattttagaaaatgcgtcatcatatttgagttttcttaataccaaagacgaagatgggctaagcgtagcagataaaattataagcacattcaaattcagaattccatactatgtcggacctttaagcgaaaaatcacccaaccattggattgtacgttcaaaagaaaaaatatatccgtggaattttcataaaacagtagacaccaagcgtagtgcagagaattttattataaatcttataggcagatgcacatacaccggtgaatatgttctccctaaagattccctgctctacagcgaatattgcctgcgtaacgaaatcaatcttctcaggataaacggaaaagaactccctcgtacagttatggatgaactgtatgaaactttgtttgtatcttcaaataaaaaggttactaaaaagacaataaaggattttcttttgataaagggttacattatcaatacagatgaactgagcggcattgacgatacgataaaaacaaaattaaaatcatatcacgatttaaaaaatatattattaaaaacatctaatccggaactggtagaagaaataatccaaagaatacttgtatttggcgacgacaaaagaatgttacgtcaatggcttgttgaaaattgccgcatgcttgacaaaaaagatattgactatgtatgccgccttaagtataaagactggggaagattttccaaaagatttcttacagaaatatatcatacagataaatccggtaaagctttcagcattatggatatgcttcgcacaaacaacatgaatcttatgcagcttctttcaagtgattataactttttagaagaagcggaaaaggtacgcaaagaaaattcatcgcaagactacagtctgcaaaaacggatagacgaaatgtatctttcacctgcagtaagaagaagcgtaagacaggctcttaaaatagtagatgaaattgtggatataaaaaaatgtgccccgaaaaaaatatttattgaggttgcaagaggaagcagagaggagatgaaaaataaaagaaccaccagcagaaaaaataagctgatagaattgtatcaggcatgcaaagaagatagcaatcctctttttgaacagttatgcaacgaggaagaaaacaggcttcgcagtgataagttgtatctttactacacacagcttggtaaatgtatgtattccggcgaaataattgacttttcatcacttgcaacagaaaattccaaatatgatatagatcatattttcccaaggtcaagagttaaggatgacagccttgataacagggtattggttaaagcagagctcaaccgtgaaaaaacaaatacatatcctgtagataatatcataagagaaagaatgcactctttctggaaaatgcttaaagaaaaaggttttataagcgataaaaaatttaccaaactccaaagacaaactccactaactgacaaagagctttcagaatttgtagcaaggcagattgtggaaactcagcagtccacaaaagctgttgcatctcttatgaaagatatgtataaagacacaagaatagtatattcgaaagcaggaaatgtaagtgacttcagacataaatacgagtttattaaatgtagggatattaacaatcttcatcatgctaaagacgcttatctgaatatagttgtaggtaatgtttacgacactaaatttacagataatttctttaagaatatatcaggtgaaaattacagtctgaataaggtgtttgaatttgacaccccaagtgcatgggatgccggcggaagttctataaaaactgtaaagcattatatgggtaaaaataatattctggttacccgcatggcaagagaaggcagaggaaagctttacgatttaaccgtactccctgcaggaaaaggacagcattccataaacgaaaatctggaaattgaaaaatacggcggatataataatgtgtacggagcttatttcatagtggtggaacacacttcaaaaaagaagcgtataagaacaattgaatctgttctgttgtgcgacaagcctctttatgaaaagaacccgacagagtattgcgtaaaaaaacttgctcttgaagatcctgaaataattgtgccaattatccgtatggattctcttttggaaataaacggttcaagacgagttataaccggaaggagtaacgttcagttaatatataagcacacttatgaacttgcaattgatacgatccatgagcagtatataaagaatatttcaaaatatgttgaccgctgttccggactgaagaaagagctggatatcacagagtttgataaaataagtgccgaagaaaacatggagctttattcgtggtttatcaaaaaactcggagctaacgtttacagacctttgtttagcaatgtattaaactatcttaataagtgcggcaatgtctttgaaagccttaatatgcttgagcaatgtaaagtactgcttgaaatattaaaaacatttaaatgcgataggcaagtttccaacctgtcaagtctgtgcggtaaatccagtgtcggaacaatactgacaagtaaaaatctttcaaatatggactcggcttatcttataaaccaatcgccaacggggctttatgaagtgaaagtaaatcttcttaaatga

SEQ ID NO: 175 - DNA, 3975 bp, unidentified
  misc_feature 1..3975: note = Synthetic sequence or unknown origin
  source 1..3975: mol_type = other DNA
atgaaaaaggagtattatttgggacttgatataggctcggaatccgtaggttgggctgttaccgacacagattataagattccaaagtttaacggcaacgcaatgtggggaatcagactttttaatgaatcggaatccgctgaacaacgcagaggctttagaagcgctcgccgtcgttacaatcgagcaaaagaaagaattaccgccttggaaatgctttttgatgaagaaatatccaagcttgatgttgctttctttcaaagattcaaggaaagcaatctttatccagaggataaaacagacggcataccgttttgcgtatttaacgacaaaggctatacagacagtgattttcacagggattatccgaccgtttatcatttgagaaatgaactcatttcaaatcaaaatgcgccatatgatgcaagacttgtatatatcgcattgcatcatattataaaacatcgtggacattttttgtttgatattaattgtgatgattataatcccgatgattttgaaaatatatatgaggatttttcaagctttttgagcgaaaactatgaaatagagcttaattgttcaagcatagaaaatttttgtaatgtgcttaagaacagaaagctttataaatcaaacaaagaaaagcaaatagctcagctgtttaatgtaaaaaagaatgaggataagcagctttattcgatgcttaagacactcagcggctcgaaagttagtttgaaagatattttttgcgatgacgagctttcgtttgacgaaaataagaaaatatctttttccgaaaagtatgatgaaaatgttgcagaatatgaggaattactcggtgatcgctttgaactgatagaaaagcttaaagcaatttacgattggggcgttcttgccgaaatattaaacggagaaaaatacataagtcaggctaagcttgcaatatataatgaacactcaaaagatttaaaaactctaaaacaatatgttaaatcttatttgccgaaaaaatacggagaaatattcaggcgttcttcaaaaagcaataattatgtcgcttattccggtcatctgaaaggaaatgaaattaatcataaatgtgaccaaaatgaattttgcgcatacctgaaaaaagaattgaatgaatgcaaagatgatgcctatcgctctatgtttgacaagatagaatttggtacatttatgcctaagcaagtgtctacggataacggcgtaattcctatgcagcttcacgagattgaacttaaagcaattcttaaaaatgccgaaaattatctaccgttcttgtctaaagcagatgacagcggcttaacggtgagcgataaaatgataaaaatatttgaataccgtattccgtattatgtaggtccgcttaatactcacagtcctaaaagctggctcactcgcaaggacggcaaaatatatccgtggaatatcgaacaaattgtggattacgataaatcggcagaaaactttatagaaaatcttacaagcaaatgcacatatcttccaaagtatgatgttattcctaaaagctcacttttatacagtaaatattctgtgctcaacgagcttaataaccttaaaatcgactcaagtgaaatcagcgtcgaattaaaacaggatatatataacgatttgtttttgaaatataacaagataactaaaagacgactgtccgactatttggaatctaagggcatatcgtataaaattctcagcggatttgacggagatttcaaatcttcgctaaaggtatatcgtgattttgccgcttataatctttctgtcgaggataaagaggaaattataagattgataactatcttcggcgatgataaaagactgattaaaaagagattgaaaaataattttgccgacaagctttcggagtcggaaattattaggatttcaaaattaaagtattccggatggagtaagctttctaaagagcttttaactcgggttaatgctgtttataaacctaccggcgaggtgatgaatatcattagcgctctttggaatacaaatatgaatcttatgcagattttgtacagttctgatttttgctgcgacgactcagaaaataaaagttttgaaaaaaagctttacgagctgaattcttttgccggtgaaaagtcattgaggcaggctgttgaagaactttatatttctccaaaggttaaacgacccgtttatcagtccttgcttattgctaaagaaatagaaaaaattcaaaaatgtcctgcaaaaaagatttttgtcgaggtggcgagagggtctcaggaaaagaagccgaccgattcaagaaagaaaaagcttgatgaattatataaatcttgcaaaaacgaatatccaaagcagttcgccgagcttgaaaacacaaaagctgaacaactcaaaagcgataaactgtatttgtattttactcaattcggcaaatgtatgtatacaggagaaaaaattgatgtggatacgcttatgcagcacaacagcatatatgacattgaccatatttatccacgctcaaaaattaaagacgacagccttgataatcgtgtgcttgttaaaaagacggttaatgcaaataaaacaaacgaatatccgattgatagccaaattcgtgaaaaaatgggcgacttttggaaaatgttgcgtgataaagaattgatcagtgataaaaaatatttgcgcttaatcagaagcaatccgctaagcgatgaagaattgtgtgcatttatatcccgtcagcttgtcgaaaccagacagtctaccaaggcggttgcacaattactcgagcagctttatccgaatacggaaatagtttatgtaaaggcttttattgcttccgagcttcgccaaacctacgatatgcttaaatgccgtgaggtcaatgactttcatcatgcaaaggatgcatatctgaatattgtaggtggaaatgtatacaatgtcagatttacacataacaaaattaattttgttaaaaagcttcagcttaatgataaggaatatacaataaatctaaattcaattttgaagcatgatattcctggtgcatgggtagccgagggtgagcaatcgcttaaaattgttaaaggtacgatgaataaaaataatattcgctatacacgctatgcatttaagcagcacggcggattgttcgaccaaaacattttgaaaaaaggaaaagggcaggttcctatcaaagcaaacggcaagcgcaatgatatcgaaaaatacggcggatataataaagccgcctccgcttatttctctttggttaaatatttcgataaaaagggtaaaagcgtaattcagtttgttccggttaatctttataatgaaaaagactatcaaaataatcctaaagaatatgtttcaaacattgtcgaatttgattgcgaaatacttattccttacgttaaatataatgcctgcatttccgttgacggattcagaatgaatataagcagcaagagcggtaatcaaattttttgcaaacctgcaatgcaactcattttgggatatgataatgaaaaatatgtcaaaggattagttagttgtaagactaaaggatttacaaatgacttaatctataagtacaatatcgaaaaatcaaacaatttggcattatatgatttgcttatcaataaaatcaaatcgacaattttaagcgttaagtttgaaaaacttgcatcggatatgcttgccggcagagaaaaatttgaacttctttctcttgaagaacaaacagatgtcatttttgaaatactgaaaatacttcattgcaatgtagtcaccggtgacttaaaaatgattggcggcagcgggaagtcgggcatagtttcaattaacagcgccgtttcaaataccaaaggcgttaaatccgtaaaacttatcaatcaatccgttaccggtttgtatgaacaggaaatcgatttgattaaataa

SEQ ID NO: 176 - DNA, 3987 bp, unidentified
  misc_feature 1..3987: note = Synthetic sequence or unknown origin
  source 1..3987: mol_type = other DNA
atgggcaaaaattattatatcgggatcgatatggggacggattctgtcggctgggcggtaacggacgaggaatacaggctgttaaaatcgaaagggcgcgatttatggggaagttatctttttgaagaagcgcaagccgccgcacagcgccgttcgttccgtacggcgcgccgccgtacagccagaacgcggcagagattgcttttattgcagagtttatttgcggaagaaatggcaaaagtcgatcctcttttctttttgcgcctcaacaacagttcgctttttttgcaggataaagacggaaaactgcgctgttcggacgcgctgttcggcgatccttcttaccgcgataaagattatttcgccgaatatcctacgatataccatcttcgggcggcgcttttgcaaggggaagtcaaagacatccgtttgttatatcttgcgatacatcacattattaaaaaccgcggacatttcctgtttgaatcgcaatcgttcagcgtaggcgatactcaaacggtccgcgaaaaatttactgcaatcaacgcgtttttaagcgaccgagaaatgccgacgctcgaactttctgcgttaagcgaggggctcgaagtattgagaaacagccgtatcggcaagcgggacaaacagctcaggctgaaagatatttttaaaaccggcggagaaaaatctctgattgcgctcgttaaggcgttgacgggcggcagcgttaatctgaaagagttgtactgcgcggaagagagttttgccgacgtttccgttttttcctttgaaaaagcgtcgtttgacgaaaccgacttgcctgcaatcgaaaacgccgtcgggcaggaagaggccgagctggtgcttcttctgaaatccgtttacgattggtccgttttgtgcgcgatcatgggggaagaacagtttatttcgctggcaaagaaaaaaatatatgaaaaacacaaggctgatttatgccgtttgaaagagtatatccgcaaaaattgtccggaaaaatacgccgacgtatttcgccgccgcgaaaagaaaagcaattatgcggcgtatatcggtatggataaacagaaagggtgcgcaaaatgcaagcgcggggatttttatgcgtttttaaaaaaagaaatcaagatcgaagacgaatatattttgacggaaatagaaaagggcgaatttcttcctaaacaggtttccgacgcaaacggcgttattccctatcaggttcatttgctggaactgaaagccattcttgccaacgcggcggggaagttcccgtttctgactgacgaacgggacggaagtacggttgccgaaaaaatcatatccctgatgactttccgtattccgtattacgtgggcccgctgcatacgcaaagtccttttgcctgggccgttcgcaagagcggatacgaaagaacgagcgttacgccgtggaattttgattccgtgatcgatgcggacgcttcggaagagcagtttatccgccgtatgaccaataagtgcacctatttggccgggcaggacgttttgcctgcaaattcactgctttacagcgagtttactttcctgaacgaattgaataatctgcgcgtcaacggggtaaaaaacgacgcggcgcgcaagctgatttacgaatacgcaaagcagcataaaaaagtaacgctgaaaaactgtctcgcgctgttgatcagggaggggctcctgcccgtcggcagtcgggcggaggaaacgttcagcgggatcgacggggattttaagacgtcgctcgctccgtggtacgacctgcgctttttagggaataagatagaaacgcaccgtgaaatgtgcgaagaaattataatctggattacgctgatatccgataaagagcggttggaaaaacgcatacgccgcgcttacggaacgattttgtccgatgaagagataaagcgtttcaagggattgaactattccaagtggggaaggctttccgccgtgcttttagacggaatcgtcagtccgcgctgtgcggacgaaaacggtgaaccgttgacgatcatacgggcaatgcgcgcgacgggcgaaaattttatgcagttgctttcggcaaaatacggttatcaggaggcgatcgacgcctataatgcggaaaacgcgccgagaggaaaagttacttataaaacggtggaagatttgtattgttcgccttcggtcaagcgcgcaatatggcgcacggtagaacttgtccgcgaaatcgctaaaatctgcggcggagcgcccaaaaaactgtttatcgaaacggtgcgcgaagtcaacgacgaccgccgcgggcaaaggaccgtttcccgcaaacagcaattgatcgatctttataaaaacatcaaaaaagaagaacgcgactggattgccgaaatcgaaaatacggccgacaaaaaattcgacagcgacaggctggttttatattatcgtcagctcggcagaagtatgtattcccaaaagccgattcggctggaggacgtattcgatacgaatatttgcgatatcgaccatatttatccgcagtccaagatcaaagacgacagtttggataatcgcgttctcgtatttaaaacggagaatacggcaaagggcgaccgctatccgctgtccgcagacgttcgggaaaaaatgatttcgttttggcgcgaattaaaggatagggcgctgatcggcgaaaaaaagttcgaacggcttacccgcacgacggcgcttacgcaggaagaacttgccgactttatcaaccgtcagcttgtttcgacgagccaaagtacgaaggcggcggcgcagattctcggggaaatatttcccgatacggaaatcgtatatgcgaaggcgggcaacgcaaatcggtttaaggatgaaaacaaaatcgttaaggtgcgcgaactcaacgatcttcaccatgcaaaggacgcctacgtcaatatcgtcgtcggcaacgtatataatacgaaattcaaccacaatgccgcggtatattttcgcgatcacggcgtagacagctataacctcaaaaatttatttacgcacgatattccgggcgcttggaaagtttcggaaaaagagcgtattttgcagaccgttgcgaaaaatacctgcagagtcgttcgtatgacggaaaacgggaaaggaaagttatttgatattcaacctaaatcggcgggtaaaaatgccgacctgatcccgctgaaaatatgcggtgcgatttccgatacggcaaagtacggcgggtacgattccgcgaccacggcatattttatgctcgtgagaagtaagggcaaaaaaggtaaagtcgcactgtctttggaggcatacccgctgtggctggataagcgtggcggcggagccaaagaggataagcttcggttctgcgttgagcgcgccgggctgaaagaacctgaaataatagtagacaacatcaaattgaacaccctgttttgcattgacggctcatatgcttggttgcgcgggaaaacaggtaatcgtgtggtctggtgcaatgccaacgagttgtttttggacgaagagagcatgcgtacgctgaaaaacataagcaattatatgcgcgatcgcaaaagattgaacaaacccgatctttgtgcgggagataaaattacggcagagtgcaacattcgcctgtacgacgcgcttgtcgaaaaactcggctcttccgtctatgccgggctttcagtcaaggggcaggtgcctttcctgcgcggaaaacgggaagcgtttgctgaactttcacgggaagaccagtgcaaaatcatattcgaagtgttgcatcttatgcaatgtaacagcgtcttgtccgatttttcctcgttgggcggcgtcgcgcatgcgggaagtattttgtctaataagtttgtacaggatatggatataaaaatgattttccagtcgcccacgggatattatcggcgcgttgtcgatctgaaagaatttatatga

SEQ ID NO: 177 - DNA, 3996 bp, unidentified
  misc_feature 1..3996: note = Synthetic sequence or unknown origin
  source 1..3996: mol_type = other DNA
atgaaagaaaatgggaacgatcggcggcaaggaacctactacattggattggatgtgggcacaaactctgtgggctgggcagtgacagatgaaaactatcaagtgaagaaatttcatggaaatgctatgtggggtgtgcgcctttttgaagaggcacagccggctgcggatcggcgaaccagtcgagttgctcgtaggagactagcacgaagaaaacagcggcttatgctgttggaatttctgtttgcagaggagattcataaggttgatcccaatttctttcggcgcctacacgaaagtgatcgttgggaggaggatagggctaccaggtgtccctattccattttccacgatgcaggttttacagatatagattatcaccgaaattatcccaccgtctatcacctgagaagtgagctgctacagtctacgcagcctcatgatgtgcggcttgtctttttggcgatccatcatatcatgaaaaccagaggacatttcctttatgaaaccggtgataatggggatgaaatccttacggtggcgcaggcatttgaccagctgaaccagtatttgcaggatgaatacgatcaaatgctggaaccggtggatcaaaatgcatttcttgacctattacaaaacaatggcatgggaataacagccaagaagaaggcacttcatggggcctatggcttggtgagcgacatctctatattgaagtttagcgcactaatcgatctgattgcaggagcttcggtgaagccagatgtactttttggagatcaaacgctaaaagatttgactagcatcaacctgaaaaatgggctagatgagttggagcagtaccgggaagcactgggggagcggtttgcacttttggaatttaccaagacgttgtttgatgccgcacggctgtctcagatccgcaaagggtatacttacatcagtcaggcaaaagtggctcagtatcaggaaaatgcttcggatttacggaaactgaagcaatacgttcgagcacagattccggatcaatatcgcatgattttttccgaaaagaaaaagggcttggacaattatgcagcctacagccaatataagctgacccagaaagattatcgctgcgatcaggaaaagttctgtaaatttttgttgggaaaacaagtgggactgcctgagccgcaagagtctgatcgagagatgtgtgaaatctatcgcaaaattaaggatggagcttttttgcccaagctgagaagcagcgaaaacggtgtgatcccatatcagctcaatcgccaggagctggtgcagattttgaagcaggcatccctgtacctgccgtttttgaaccatgtagatagcgatggcctttctgtcagcgataagatcatcaagacctttgaatttcgtgtgccctattatgtggggcctgtcagtgatcaggcaggacaccattgggctgttcgattccagggcaaagagaacgagaaaatctatccctggaattttgaacaggtgattgatttggaacgatctgcggctggatttatggaggatctggtagggcgctgcacctataccggggaaccggttctgcctaaggactccctgctctacagcgaatttatgctgctcaacgaagtaaatctcatcaaaatcaatgggaaatcccttcctgtgaatgtgaaaaagcagctggtacaggatttattttatcattccagcaaaaaggtgacgaagaaggggattgtccattatctgacctccaaaggcttgatgacccaatcggatgaattaaacggcgtggatgatcggattaaatctaccctgcgctcgtaccatgatttcaaagacatattgaagcgcaccggggatcgagatatggtggagaatatcatccgcagcattctggtatttgggaatgatttgaccatgctccagagatggctgaaaaacaatacgcatgatctgacggaggaggaaatcagacgaatttgtaatctgcgctcgaaatataaagagtggggaaggctgtcccgtaccttcttgaccgaaatctatagcccggatgagtggggagaagccaagagcatcatggactacctgcgggacaccagctgcaatctgatgcaactgctctccaatcaataccagtttgcggatcaggcaaaggctcattttgatgctctgatgggaaatggacagacactgagccagaagctggatgatttgtatgttgcgcctgcggtgcgtcgcagtattcggcaaaccctgcgcattgtggatgagatcgtagacattgagcatggtgttccgaaaaagatttttatcgaaatggctcgggataatgcgcaggaagtgaaaaagagccgcactgagagtcgaaaggataagctaatcgcactatatcgtgcctgccatgaggatagcggtgaactgttccaacagctggaacaggaagaggatagccgtttgcggagtgataagcttttcctctattacacacagtttggcaagtgtatgtattcgggggaacccattgatttggagtcgttgctgcggggagaattgtttgacatcgaccatattttcccgcagtcaaaggtgaaggataacagtcttgacaatcgagttgtggtaatcaatacactaaaccgagaaaaaagcaatatctacccgattcaaggagaaatccgccgtaagatgcagcctttctgggcaatgttaaagagcaaagggatgatcagtgaaaaaaagtatgatcgattggtgcggaatacagagctgacggaagaagagttgtcctcctttgtggctcgtcagttggttgaaacccgtcaatccaccaaggcgctggcaaccattttgcaagagacctatggagaccaggtgcgactggtttattccaaggcaggaaatgtgtctgacttccggcagcagtttgagttagtaaaatgccgtgatgtcaatgatctgcaccatgctaaggatgcctatttgaatattgtggtgggaaatgtgtatgacacaaaatttacggaagtattcttccgcaatattaagaaagaaaagtatagcttaaagaaggtattcgagtttgatacgcctggcgcatgggacaaaacagagagcattaaaaccgtcaaaaagtatatggcgaagaacaatgtgctggtcacgtggatgccgcaagaaaaacatggcaaaatatttgaccttatgttggttagagcgggaaaagcaaaagtaaataagaagcagggattagatcaggaaaaatacggcgggtacacgatgaggtattgtgcgtatttctgcctagtcgaacatcgcattggaaaaaaacgagtgcgtagtattaagccggtttatatgtaccaaaaagtagcatatgaacaagacccattagaatattgtcgaaatatactaatgctccacgaaccacgagtaattgttcagaaaattttggtcggtgcactaatggagctgaatggaaaaagactgacacttacagcaggagaagaaggcagaattaaattaaaccacacttaccagttgatagtgggagaaaaatataaccagtatatcaaaaacgcatcaaaatattatgatcgttgtacggcacaaaaagcagagttgcctgttacccaatttgatggaatttcagataaagacaatatcgacctatatcatgaactcatcagaaaatgcaaaacgtcaatttattcctcttgttttggtgcgttcaatatcattgcagaagaaatggaaaaatgcgaagatatttttacaggaatgtccactttggaccaaataaagattttgcttgaagtaataaaggcatttcggtgcaatgcggtatacgcaaatttcaaacagctttctggtcagcaagtccggggacgtatccgtatcaatgataaaatttctgaacttaacacggcatatctgatcaaccaatccgttacaggtctctatgagcacagaatcgacctgttaaaataa

SEQ ID NO: 178 - DNA, 3996 bp, unidentified
  misc_feature 1..3996: note = Synthetic sequence or unknown origin
  source 1..3996: mol_type = other DNA
atgaaggaaaatggtaatgattccagacagggcgattattatgttggcatagatgccggcacaaattccattggttgggcggtaacggacgagaattatcgtgtgaagaagtttaagggaaatgcaatgtggggcgtgcgcttgtttgatgaagcgcaaggtgcagatgagcggcggacgaatcgcacggcacgcagacgacttgtgcggaagaagcaaaggcttatgctcttggagctgctgtttgcggaggaaatagccaaggttgaccccaatttttatcttcgcatgcaggaaagcgggctttggcgggacgacaaaacgggcgacagccaatttgcgctgtttaatgatgaaggcttcaccgaccgagaatacttccaaaaatatccgacggcgtatcatttgcggtgcgagctgctacattctgaagacccgcatgatattcggctggtttatttggcgttgcaccacattatgaaaaccagaggtcattttctcttggatggagttgaagatgttgagcaaatgacaacgcttgatggagcgctggacgagctggcggcttttttgcaggaagaatatgagctgtattttgtgccgaaaaacagggcggagttcattgctgcgctggaaacacgagatattggtattaacgctcggaaaaaagcattgaaggacgcatatggcaaggcggaagatgcggaagatcttagtatccctgcgttgttggacttgcttgcaggggctgccgtgaagccggaggtgttatttgaggataattctcttaaagacggtgatgtgagcagcatttctttcaaaaattttgaggatgagcaggaaaattacagtgagcttttgggtgaccgtatggaaacgctgcttaaagtgaagaacctgtttgatacggcgcagcttgccttgattcttaatgacaagacgtatattagcgaagcgaaggttgcgcaatatgagcaaaacgggcatgagctgcatttgctgaaagagtatgttcgtaaacgtattcccgataaatataagctgatttttgacgaaaagaaagaaaagttggataattatgtggcatacagcggtgacaaacggcgcagcggagcatatacatgcacgcaggaggctttttgcaaatttctgcgggggaagaatgttgagctgcccgagccggacgcttcggatacggaaatgtgcaccatatatgcgaaaatcaaggataatattttcctgccaaagctgcggagcagcgaaaacggtgtaattccttatcaactgaataagcaggagctggagcgaatattggagcttgccgcacaatatctgccgtttttgaatgttgtggatgatgacgggttgtctgtccgtgagaaaattgtcaagacttttgaatttcgtgttccatattatgtcggaccggtgagcgacaaggcgaagcatcgctgggcggtcaggtttgacgaaaaggcaaagacaaaggttttgccgtggaattttgagcatgtgattgacacggaaggctcggcaatcgcctttatggagcagcttatcgggcgctgtacctacacgggcgaaaaggtgctgccgaaggattccttgctgtatagcgaatttgcgctgctgaatgagctgaatttgctgaaaatcaacggaaaatcgctgccgataaatgtgaaaaagcagctggttcaggatttgttctatagctccaagaaaaatgttaccaagaaaaccatcagccgttatctgcgggcggaagggttgatgacggaggaagatgaggtcagcggtattgacgataagattaaatcaaaattgcgttcgtaccatgattttcgggatattttggtaagaacgggcgatacagccatggtggaagatattattcgcagtatattggtgtttggcaacgacaaaaaaatgctgcgccgctggctggaacataatacgcatgacttgaccgaggcggaaataaagcatatttgtcacttgaattatcaagattggggcagattatccgaaattttcctcacgaagatttatagcccggatgaaaatggagaagccaaaaccatcatggattatcttcgcgagacaaattgtaacttgatgcagcttatgtccgaccaatatttgttcgctgaaaatgccaagaagcattacgatgaactgtttggcaatgggcaaacgctgacggcaagattggacagcatgtatattgcacctgccgttcgccgctgtattcggcagactttgcgcattgtggacgagattgtggatattgagaagtctgtgccgaagaaaatatttatcgaaatggcacgggatagagctcaagatgtcaagaagggacggacggagagccgtaaggacaagctgattgcgctttatcgcagctgtaaggaaaccggcaatgagttatttaagcggttggaaaatgaagatgaaaatcgcttgcgcagcgacaaactgtacttgtattatacgcaactgggcagatgtatgtattccggcgagccgattgatcttgaatctttgctgcgaggggaattgtacgatattgaccacatctttccacagtctagggtgaaggataacagcttggaaaatcgtgttttggtaaaaaatacgttgaatcgagaaaaaaccaatgaatatcccattaaatcggaaattcggaagaaaatgcagggattttggtatggattgcgacagaaggggcttatcgggcagaaaaagcttgaacgtctgaccagagcaacaccattggcagaggcggaattgtcgtcatttgtcgcacgtcagctggttgagacgcagcaatcgacaaaggcaatggcaactctgctgcaagatatttatggggataaggtgcgtatcgtatactctaaggcgggcaatgtgtcggagtttcggcagaagtttgaatttatcaaatgccgtgatgttaacgacttgcaccatgcaaaggacgcctatcttaatatcgtggtggggaatgtgtatgatactaagtttacgcaaagattttttgtcaatatcaaaaatgaaaaatacagcttacgccgcatctttgaatttgatacggacggagcatggaaggttggtgaaactatccggactgttaaaaagtatatggcgaaaaataatgtgctggtaacgagaatgcctcgtgaagtcaggggtgctttgtttgatttgcagcttatgccggcgacaaagggacagcttgcgagaaagcagggcatggatattggcagatacggcggatataacaagctgacaggggcgtatttctgtgtggttgagcatacggagaagaaaaagcggatacgaaccattgaacctgtttatctctatcaaaaatctgcatacgaaagtgacccggttgcttattgtaaagatatattgggattgtgtgagccggttatcattgtgccggaagtgcggattgattctttgctggaaataaacggcagcagatttatgatttccgggcgaacaggtaatcgaatagtagtaaaacatacttatcaactgttgctgtctaatgcagaggagcagtacgtcaaaaatcttggtaagtataacgaccgctgtgctgcaaagaaggaagaattgccggtaacggagcatgatggaatttctgctgaggaaaatctgaatttgtatcgtctgctcgtgaagaaatgtaatgaaaaggtttatagcacgtgttttactacattcataattatgggaaacgagatgaaagagtatgagaataagtttattgcaatgtcaatatgggaacagacgaaaattttgctggaggcattgaaggcttttcgctgcaatgcggtttatggaaactttaaggagctatccggcaagggaactcgaggattgatattgatgaataaaaaaattagcgagctttcctcggcatacatgattaaccaatcaataacggggctttatgaacatcgagtcgatttgctgaaatga

SEQ ID NO: 179 - DNA, 4011 bp, unidentified
  misc_feature 1..4011: note = Synthetic sequence or unknown origin
  source 1..4011: mol_type = other DNA
atgaaggcaaattggaattattccgtgcaagggaactattacattggacttgatgttggcactaactcggtgggatgggcggtcacagacgagcaatatcacatgaaaaaatttaaaggaaacgccatgtggggcgttcgtctgtttgaggatgccaaaagcgcagagcagcggcgtgtcagccgcgttgcccgtagacggcttgaacggaaaaaacagcggcttatgctgctggagctattgtttgcagaagagatcgcaaaaattgacccacaattttatcttcgtatgcgtgaaagcgatcggtgggcggatgaaaagcaaagtggcagcaaatattccttgtttcacgacacagactacacagataaggagtatcatcaaagctatcctactgtctaccacctgaggagcgagctgctgggttcttcgcagcctcatgatattcgtctcgtgtatctggccgtacatcacatcatgaaaaatcgcggacactttctctatgaaatgtctgatcattccaatgagatcatgacggttccgattgctttggaagaattgcaacaatatatccaggatcattatggccgagatttcgaaccggaaaaccgagagcagtttgttactgagctgcaaagaaacgatattggagttaccgaaaaaaagaagatgctaaaaaaggcatacggaaggatagatgaatgtgaggaactcggcatatccgcgctcttagaattgctcgctggtgcttctgtaaagctggctgtactatttgctgatcccgatctaaaaaatggtgaggtcagcagtgttagcctgaaagatatagatgaaaatgcagatacctatgtcgatgcgctgggagacaggatcgggcttttagaaagtgccaaaacgctgttcgatgccgcaaggttagcgcaggttcgtggagatcacacttatatcagtcaggcgaaggtggcgcagtacgagcaaaatcgctcggatcttagacagctgaaacggtatgtccgccggacaataccggataagtacaatcttattttctccgagagacaagaaaagctgaataattatgccgcttatagccaatatggattacaacacggggactatcactgcggtcaagaggcgttctgtaaattcctgttgggaaaggaagtggggcttccgaagccggaggagtcggatacagagatgagcaccatttacgcgaaagtcaaggacggaatctttcttcctaggctaaggggaagcgagaacggagttatcccttaccagctaaatcgtcaagagctggtgcaaatattaaaaaatgcgtccacgtaccttccttttttaaatcgtgtggacgaagacggcctttcgttgcagaagaaaatcattcagatctttgaatttcgtgtaccctattatgtcgggccggttagtaatcgagcaggacaccattgggcggtacgtttttctggtaaggagcaggaaaagatatttccatggaattttgaacagattgtggacacggaaagttccgctgcggcgtttatgaagaatctcgtggggcgttgtacttatacaggagaaccagtgctgccgaaggattctctgctatacagtgaattcgctcttctcaatgagatcaaccctattcaggtcaacagaaagccgctgccgctagatgtcaaaaagcagttggtgcaggatctgttttatcggccagaaaagggaacccaaaagaggacagttaccaaaaaggacatcagcaattacctcatatccagaggactgattggtgagggtgacgagatcagcggcgtggatgataaggtcaagagcaagttgcgctcttggtacgattttgaggatatcctgtctcgcactggtgatagagacatggtagaggacattattcgtagcattttagtgtttggaaaagacaagaagatgctgcgtcgctggcttaagaaaaacactcacgggctgactgaggatgatgtgaagcacatttgctgcctaaaatatcaagattgggggcggctgtccaagacccttctgacggagatatatagcccagacaaatatggagaagccaagactatcatggattatctgcgggataccaatctcaatttgatgcagcttttatctgacgactttcaatttgcaagtaacgcgaaagcccattttgatgcactgtatggaaatggacagacgttgagccagcgactggacaatttatatattgctcccgcggtgcggcggagtattcgacagacgctgcgcattgtggatgagatcgtagatatcgaaaagggagtgcctaaaaagatatttatcgagatggccagggacgatgcgcgggcaatcaagaaaaaacggactgagagccggaaggacaagctgatcagcctgtataaggcctgcaaggagggcagcggagaactgtttgaaaggctggcaaacgaggacgaaaaccgcctgcgcagtgataagctgtatctctactacacgcaatttggaaggtgtatgtactcagaagagcctatcgtactggatgcactgctccggggagaaaagtatgatattgaccatatttttccgcaatccaaaataaaggataacagcctagacaatcgtgttctagtgaaaaacacgctgaatcgggaaaagaccgatgagtatcccatcaagaccgatatccgacagaaaatgcagccgttctggtacagcctgaagcagaagaatctgatcagtcaaaagaaatatgacagactaacccgtgggacaaaattgacgaatgaggaactgtcttcctttgttgcgcggcagctggtggaaacccggcagtctaccaaggcacttgcgacgctgttaaaagaaacctatggtaacatgacccggatcgtgtattccaaggcgggcaatgtatctgattttcggcagaaatttggttttgtaaaatgccgcgatatcaacgatctgcaccatgccaaggacgcttatttgaacattgtggtgggcaatgtgtacgacacgaaattcacgaaacagttttttgccaatatacagatggaaaactatagcttgaagaaagtgtttgattttaacacaccagaggcatggaatacggtggagagcattcagacggtcaagaagtacatgacgaagaacaatgtactggtaacaagaatgcctcatgaggcgaaaggcgcactgtatgacttgcagatcatgccggcgggcaaaggtcaacttcccaaaaagaacggaatgtcaacggaacggtatggcggctataataaattgaccggagcatacttctgtatagtggaacacacagataagaaaaaacgtgtccgtaccatcgaaccggtatttctgtaccaaaaagaggcttatgaacgtgatccggtcatttattgccaaagcattctgggcttgaaggaaccggttatcattgcctccaaggtgcggattgatactacgatggaactaaatgggaacaggctgctgattacatcccgtactggcaatactattatcttcaagcatacttaccagatgattgttggttcggaatttgagcagtacattaagaatctgtccaaatataacgacaggtgcaaagcaaaacgcgaggaacttccggtcacatctttcgatggcatttcaagggagaaaaatatggagctgtatcagcttttaactcgaaaatgtggggaaagcgtatacagggtctgttccagtgccttcacaattatgggaaatgaaatggcggcctatgaggacaagtttgcgggcatgtcgctgtggacacaggtgaaactgctgttggaggcactcaatgccttctgctgcaataccacttatgctaatttcaaagagttgtctgggaaaggcaccagagaccgtgtagagttcaataaaaaccttagtgttttttcttccgcgtttttgattaaccaatccgtgaccggtctttatgaacacaaaattgacctattgaaatga

SEQ ID NO: 180 - DNA, 4011 bp, unidentified
  misc_feature 1..4011: note = Synthetic sequence or unknown origin
  source 1..4011: mol_type = other DNA
atgaaaaacaacggaaatgataggataaagggcaattattatattggacttgatgttggaacaaactctgtcggatgggcagtaacagatcatgactataacctgcataagttcaaaggaaatgccatgtggggtgcgcgtctgtttgacgaggcacaggatgcgtcattaaggcgcacaagtagaacgaatcgcagaagactagcgcgcagaaatcagcgactgcttttgttagagttgctgtttacagaagaaattagcaaagttgaccctgcatttttccttcgcatggaagagagcgctttatggttggatgataagaccaataagatgtgtcgcttttctctctttaatgacgcagattttacagataaagattatcacagaaaatatccaacaatttatcaccttcgtcatgaactaatgacttcttcggaaccgcatgatattcggctggtttatctggcattgcatcacataatgaagagccgtggtcattttttgtacgaaacaacatcacgagatgactctattcgcccgattgaagaagtatttaaagatctggagaatcttcttgaatcagagtattatattgcccttgagcccgatgatttaaacggctttctcaatacgcttacacgtaaagacctgggaattaatgccaagcaaaaacttcttaaagctgcttggggcggcaaagaaaacaaagagacgcttgttaatctgtccgcagcaattgatttacttgccggaaagagcggcataaagctttcaacattgtacaatgatgagagcctggctggggtggacccggaaaagatttctttggcaaatggttttgaagaaaaccttgatgatcttagcgcaattcttggagatagaatcagtttactgattcaactaaaagaattatatgatacagcattgcttggtcaaatgctgcagggatatgattctattagtgcagcaaagattgcactttatgataaaaataaaaaagatcttcgtgcattaaaacattatgtgcgtcaaaacgcgccggagaaatacaaagaagtttttgttttaaaaaagagcaaactgaacaattattctgcttatagtggctataaaacccgaagcggagaccattcttgctcgcaggaggaattctgcaaatatctgattagttgcaaactgcccgctcccaaagctgatgatgaaataatgaatcggatttttgatgaaatcaaggagggcacgttccttactaaattgagaggcacggaaaacggtgtgattccttatcaaatacaacgtatggaattacgcgctattcttaaaaatgcctcaaaatatcatacgtttctgaatggtaaggacgaggatggcaatacggttagtgaaaaaatcgaaaagatctttgaattcagactgccgtactatgttgggcccttgaataagcaggcagggtcttattgggctgttcgtttccctgacaaagagggtgaaaaggtttacccttggaactttgaaaagattgtagacactgaagcctcggcaaaaaagtttatgacgaatctgattggacgctgctcttatacgggggaaagagttctgcccaaggactctttgctgtactccgaatacatgcttcttaatgaactgtctccgctcaacatcaatggaaagcctgttagtgttgaaataaagcaggccatcgtgaacgacttgttcaaaaaagaaaagagagctgtaaccaaaaacagcattcgcaattatttgctgagcagaggatacatcgataagtctgtaggaaaagatgacatagggggcattgacgacagaattaaaacctcacttcgctcttatcatgattttcaagctattttggatcgtacgggagaccaggaaatggtagaggatattatcctccatattctggtttttggtaatgatcgagtaatgctgaaaaaatggttaaggaataatacacatggtttaaatgaagaagaatatgatcatatctgccgtttgaaatacacggactggggcagattatccaagacttttctcacggatattctaagtgtggatcccgaagaaggaacaggcgaactacacaatattatatacatgctgcgtaataccaacaagaaccttatgcaattgttaagtgacaggtactctttctctgcgcaagcagaagagcatcgtaaggaacttgtgggagaaaaacagagtcttgctgaaagattaaatgatatgtatattgcaccggctgtccgcagaagtatccggcagacactgagaattgtcgatgaaatcgttgatattgagaagtctgtcccggaaaaaatctttattgagatggcgcgtgacagttctaaagcaatgaagggaaaacgcacagaatccagaaaagaaaaactgctggctctttacgcaaatagtaaggaagaagcagctgaattgttgccaaaactaaagaatgaggatgacaatcgccttcgcagtgataaactctatctctattacactcagttcggaaaatgtatgtattccggtgaaccaatagatcttgatgcattgatgagtggacaaggctttgatattgatcatattttccctcagtcgcgcgtgaaagataacagtcttgataatagagttgttgtcaaaaatacgttgaatcgtgaaaaaacgaataactatccgattgaaaaaaatattcaacgaagtatgcgctcttattgggatatgttaagggcctgtgacatgatcagctctaaaaaatatgatcgattgattcgtgctacgccacttacggatgaagaattatctgctttcgttgcacgacagcttaccgagactcagcaggcaacaaaagcattgacagttcttcttcaagagacatatggagatttgactcgtatagttttttctaaagcgggaaatgtcagtgattttcggcatgactttgatatgattaaatgccgggaggtgaacgacttacatcatgccaaagatgcttatctgaatgttgtggtagggaatgtgtattgcacacgttttaccgatcgtttctttgctaatattcacaatgaaaattacagtctaaacaaagtattcgcttttgatgtgcctggtgcgtggaagaaagaagagacaataaaaacggttaaaaaaaccatgtctaaaagtaaccctgttgtcactcggatgccgcgtgaagtgaagggacagttatttgacttgcaacttatgccagcgggcaaaggacaacttgaaaagaaacgtagtttgagaattgaacagtatggcggatacaacaagattacggggagttattatttcgtggcagaacatacggtgaaagagaagagaatacgatcaatagaacctgtatacctctatgctcagaagcagtatgaggcagatcctaaagcttatgctgtctccgttcttggccttgttgcgcctgagattatttgtaaagagattcgagcagacgcgcttctcgaaattgatggcagcaggatgtatatttcaggtcgaacaggggataattatgtttgtgaacatgcatatcaattagcaatagacgtggacaaagaaaagtatatcaaattactgactaaatatgctgaacgttgtgcggcaaggcgggcaccggtagcaataactaaatatgacggtattacggctgaagacaatgaggagctttacaattactttttgaaaaaaatagaaggaggtgtttacgccaagctgctaaagaacatgaaaaaggatctggaagaaagcaagaacacctttttgtcaaaatcgctatatgaacaggcgttaattcttctcgaaatactaaaaccatttcgtagtaatgcacagaacgccaatctgaaagacctatgtggaaagggaacagtggggcgcataattgttaataaaaaactaaacatgcatgcgtctgcaaaactcgtccatcaatcggttacagggttgttcgaggtgagtgagaatctgttgggatga

SEQ ID NO: 181 - DNA, 4014 bp, unidentified
  misc_feature 1..4014: note = Synthetic sequence or unknown origin
  source 1..4014: mol_type = other DNA
atgaaaaaatataatattggattagatattggtacaaattctgtaggatgggcaatcgtagaagatagtactaacaaagttctaaaaaaagggaagaaaagcctatggggtgttagactttttgaaactgcagaaacagcagaagaaagaagaaaacaccgtagttctagaagaagatatgatagaagaagacaaagaataaaactattacaaaaagaattttgcaatgaaattaataaagtagatgataaattttttacaaaattaaaagaaagtaaataccatgaaaaagacacattaaataaaacagttaaattaacaaaaacagaaaaacaaatgctaaaagattattatgaaaaaaatccaacaatttatcatttacgaaactatattgctaatactactgaaaaagtagacattcgattagtatatttagccatccatcatataatcaaatatagaggcaacttcctatatccatttaaaaatataaatatagataaattagatatagcagcacaattacaaaacgcattttcattactatatgacacgactgctattgaagatgaagcctttattgaagaaattgactttaacgaacttgaaaaagatttattattacaatctaaaaaagatacaatggtagaaattgacaagatagtaaacaaatttctagataaaaaaacaacatcagaaataaaacaaatgctagtcggaaattccttttctattagcaaactatttaataaagaagaagataaagattttaaaattaaatttagtaacaatgaatatgaagaaaaatatgctgaaatagaacaaaattatcctgaaaatatcgaagtattaaatgaatttaaaaatgtatatgatatgatttttcttaaaaaaatttttaaagatactgacgacgtctctatttcttcttatatgattcaaaaatacaaccaacataagaaagatttgaaatttttaaaaaagattttctctcaagataataaaaatgatagtaaagaactaataaaactaagacgtaaacattatttagaaatatttaaaagtaatagtaaacgtatatgtttgtatgacacctatatccataataaaattgattacgaaacatttataaaaaacatagtaaaagcagcaaaagaaatattaaacgatgagcaatacaatacaacaatcaaaagaatagaaaacgaaaaatttttaccaagaataacagaaaaagaaaatagtgcatttccataccaattaaataaagaagaattaataaaaattattgaaagtcaatcaaaatattatccttttctaaaacaaaaaatagatgaagaatacaaacttgtaaaattattagagtttagaatcccatattatgttggtcctcttaataatacaacatccaaagcaagtgtaaaaaataccaattcttggatagtaaagaaaagcaatgaaaatattacaccatataatttcgatgaagtagtagatttagacgaaacagcagaaaaatttatttccaaaatgcaagcaagttgcacttacttattaaatgaaaaatcaattcctaacaactcgattttatattcaaaatataaagtgttaaacgaaatcaaacaaattcgtatcaatggagaaaaagtttcagtaaatttacaaaacaaaatttacaatgaattatttttgaaaaaagctggaactattacagataaagtctttagaaattacttaaaacaaacgaatgaaataagaatgtatgatggaattaaaatcacaggatattctgctgatggaaagtttgccaataatatgcaaccatacattgatttcttcggtgaaaatggtatttttaaaaatacgaactataaattaaatgacgctgaagtaatcattcattggatgacgatatttgaagataaaaaaatcttaaaaagaaaaattacaaaaacttatcctgaattatctagtgacgcaataaacaaaatattagttaagaaatataaaggatttagtagactatccaaaaaacttctaaatggaatttactatacagaaaaggacacaaaaaacacgaaaacaatcatagaattgatggaagaaaccaatgaaaatttcatgcaaattttaaataataaaaagtatgaatttcaaaaacaaattgatgatttaaatgatatcaaacaagatgacaaaataagttatgaaatagtgaacgaattggcaacatcaccatcaactaaaaaaggaatatatcaagccttaaaagtagtagatgaattagtaaagtatatgggatacgatcctaatattatctcaattgaaatggctagaggaaatagaaaaagtagaagaacaattgacagaaaaaacttcttaataaatttatacaataaatatagagatgatattgaaaactatgatttattatttaaagaacttaaagagacagaaacaatttctatgaaactatttttatattttattcaacaaggaaaaagcttatattctcaagaaccattaagaattgaaaaattagattcttatgaaattgatcatattatccctcgcactttaattaaagatgattcaattgataacaaagcattagtgttgaaagaagaaaatcaagataaagcagccagttttgttctgcctgccaaatatagaacaattactagaatagattggtggaagaaattattagataatggcttcatttctaaaaagaaattttataatttatgtagaagagaatatagtgacagcgatattgaaggatttatcaatagacaattagtggaatcaagacaaatcactaaacatgtagcaaatattctcaaaaacttttataaaaagtcaaaaatagtatatttaaatgcagacttatctagtaattatagaaaaaaatacgaactttataaatttagagacattaatgatttccaccatgcccatgatgcttacttagcttgtgtcctaggaaaatataaacaagattatttaaaagtaatagattatgaagaattaaaagaaaaaaacaaagaactttttgataaaaaagaatacaacactctaaaatatggctatattatcaatagtttagaagagaatatttatcacaaagatactggcgaaatactattcgatgctactcactttaaaaagatagtagaaaatagcttatatcaaaacgatattttaataagcaagaaaacagaaattagaaatggaaaactttatgatgaaacaataaataaaaaaggagcaaaaggcgttccgttaaagaaaaatatggcaacagaacgatatggatcctattcaagcataaaacctgcttatgcagtagttgtgaaataccattataaaaatgaagatcttcaaaaaataataggaataccaatttatatagaagcattcacaaaaaaagataaagtaattaaagaaaaatatataaaagaattattaaacttagaagaaaatgatagaattgatatcattcatgacaaaattcctttttatactacaattgaatatgatgggaaaatatgttttttagtaggagctactgataaagtcgaagtatgtaatgccaaagaattctattttagtaaagaaaaaatgaaagaatggaaacacacattaaacaaattacttaataaagaagaatcattaaaagagaatgataacgaaaataagtatgaagaagatttagaaaatataataaaatacatagtgtcaaaaatggagaaagaatacaaactatattccgaattagtagaaaaactaaaaaatatgattattaataaaattgataaattttctttagaagaaaaaaaaagaataattttagaattatttcacctattaaaagtaaatagtacaacagccaattttaaatttttacaagaagcttcagcctttggtagaatgaataataaaacaattagaagtggtaaactagtaaataattcaattaccgggttaaggaagaatatacatgagttttag

SEQ ID NO: 182 - DNA, 4029 bp, unidentified
  misc_feature 1..4029: note = Synthetic sequence or unknown origin
  source 1..4029: mol_type = other DNA
atgtcaatacaaagtgtaaaaaaagattattttttaggtgtggatatgggtacgggctctgtaggttgggcacttgcttatatggattacagtgttgttaagtataaaaacaagctgctttgggggtcacatctttttgatacggcacagactgcggtagaggcaaggcttaaccgctcaacccgcagacgttatgcaaggtcggcggaaagggttaagctgttgcaggagctttttgcagaagaaattgcaagggtggactttggatttttccaaaggatggaggagagcagactttggcaggatgataaaaccgaaaaccaaaagaatacgctgtttaatgatgttggctatgatgatggaatttaccacagtgagtataaaacaatctaccatttgcgtaaagcacttatagatggtggaaagagctttgatgtacgcttggtttatcttgcactgcatcatctgattaagcatagggggcattttctttttggtgacagagtgcttggagatgtgcgtaattttgacacagctttcaaggctgtcagttcggttgtttatgaagtgcttggtgcagagcttaaggttgatgatatatccaaggttggtgaggtgattaaaaacaggcgtgacggcttaacaaagcgtgaggatgcgctaaaggcactttttggtgtgcaaaagggcgacaagcgtatgcaggagcttattaagctgatggttggttcaacggctgatttgaaaaagctttttatgcttgaggagcttgaaaacaagtctgtaaagctgtcggataacaacgttgaggatgtacttttaaatgtatcggaggagctggatgaggattattatgccgttgttgatgccgtaaaaatgatgtatgactggggtacgcttgaaaatattttaagtgggcataattatatttgtgagggtaaaattgaggcttatgaaaagcacaaatccgatttggaaaggcttaagcgtgtagtaaaaagatactttagtgccgactacaataaaattttccgtacggagaatgaagctgccaattattgcagctacacgggtgtatcaaagctacctttgaaaaacggcaaaaaatgtacgcaggcggatttttgtgtctttttgaaaaagctgcttgtaaaaaatgccgcttgtgaaacggatgaggattatttatacatagttgaggagcttgaaaagggtacatttatgcccaagcaaacaacctcacaaaacagcacaatcccttatcaggtaaacaaaatggaactttgtaaaattttggaaaatgcagaggagtacctaccgtttttagcggaaagggatgaaaacggcttgaccgtatcggataaaataaaaaagctttttgagtttaggataccgtattatataggaccgcttaatgatacacatcaaaacaagcgtgttaacggtagctgttggatagtgaaaaagcaaggcaaggtttatccgtggaattttgacgctatggtggatacggacgaaagtgcagagcgttttataagcaaaatgacaaacaaatgctcctaccttttgggtgaggatgttttgccggataagtccgtgatatacagcaaatttaaggtgttaaatgagcttaacaaccttacaataaacggtgagagaagtccggagcttaagcaagagctttttaatgagctgtttttaaagcaaaaaaaggttaggctaaaggatatagagagctatctaaggggacgtggctatgaggttaatgccatagcgggcataagcggtgaaataaaaaacaatatgtcatcctatatcacttttaaggaaattatcggagacaaggctgacaatatcacaatgtgtgaggatataataagggcaataaccttgttcggagcagagcctaaaatgcttaaaagacgtattgaaaagcattacggtgatgtgcttacggcggatgaaataaaaaggctttgcagacttaaatacaaggattggggcagactttcgtataagctgctttgcggcatcacggatgaaaaaaccggtacatgcattattaatgctatgcaggagcttgggcttaacttgcaggagcttttgagcagtcgttacagctatatgtcacaaattgatgagcttaataatattggtgagtctgtggggataagagaggagatagagttatcggcactttcgccggctgttaagcgtattgctataaggacgttggatgttaccggtgaggctgttaagcttatgggttatccacctaagaagatttttgtagagatggcaagggatgttgacggcaaaaatgaaaaaaagactaagccgtcaagaaaggataagctgtctgagctttacaaaaatattgacgatagggtacttgcagaggagtggaaagctaagcttgataatgaaacgaatgatagcttaaggcgtgataagctgtttttgtactacagtcagcttggcaagtgtatgtattcgggtgaaaaaatagattttgagcagcttaacaatgacaacatctatgatattgaccacatctacccacaatccgtcacaaaggatgacagccttgaaaacagggtgcttgtgcgtagggaattaaatgaaaataagggagatacctacccgatttcatccgatataagacgtaaaaattatgcccattggaagcttttgcacgacaaaaagcttatcggggataagaagtttgcacgccttacaagggatgaggagcttacggatgaggagcttgcaggctttattgagcgacagatagtggaaacaaggcaatctacaaagtatgtggcaacactttttaaaaggctttatcccgacagtgaggtagtatatgttaaggcgggtcacgtcagtgatttcagacacgatatggacatagttaaggtaagggatattaatgatttgcaccacgcacaggacgcttatctaaatattgtggttggtaatgtttataatgttaagtttacgcacgacgtgttgaggtacataaaaaataacagaggtaagagagattacaaccttaaaaagctgtttaaatactataccgttaccgataggtcaacaggtgaaattgtgtggaaaagcggtgagggcggtacaattgcagacgtgaaaaaacagcttgagagctttaacatacagtgtacaaggtttgccgttacgggtaagggcaagctgtttgatgtacagccgataccaaagcataagtgtggtgagggtgtgcaaataccgcttaaggaaaatgacagcagacttagtgatgtaacaaggtatggtggttacaacaaagtcaaaattgcgtactttttctgcgttgagcatacggaaaagaaaaaacgtatcagaacaattgaggtaatgcctatttatcttgctgaccgtgtaggtgaggatgggttgcttgattactgtatagatagccttggactgattgagcctaagataattgttaaaaaaataaagctgtacagcttggtcaaaattaatggatatttttattacctatcgggtaagcaaaatgacagatttttaatgtacaatgccgtacaattgtgtgttgacaagcaatcgtcggaatatattaaaaagcttgttaagacaagaaaaatattgtcggaggataaggagtatgatgttgcggagcagaaaataaattatgatgagaatatggctctgtatgatttgtttgttgaaaaacaaaaaagcggcatttattcaaagcgtataaataatgcacttaagataatggaaaacggacgggtaaggtttgcagagttgtcgctaagtaatcagtgcatacagcttgtaaatttgttgggtttatttacaggtggagcttgcaatggagtcaatacagagctgataggtggtcagtcgaaaggaaataaaataactacaagtaaggttatcagcaataacatagagtttaagcttatttatcaatcaccaacgggtatatatcaaaccgtgattgacttgcttggtgaaagctga

SEQ ID NO: 183 - DNA, 4029 bp, unidentified
  misc_feature 1..4029: note = Synthetic sequence or unknown origin
  source 1..4029: mol_type = other DNA
atggaaaagaaaaagcaattcggcaagtattatatcggcctggatatcggaacagattctataggctgggctgtaactgatacgaattatgaattgcagaaattcaatcagaaatccatgtgggggtccaggctttttcctgaagcccagacagccgtggatcgcagagtgaatcgtgtcgctcgtaggagaatccagcgcaggaatcaacggctggctttattgcaggatctgttcaaagacgaagtatgcaaaaatgatcctcagttcttcgctcggttgagtgaaagcatgcttcatgcagaggacaagacagtcggtggaaagaacagcttgtttggggatagcgttattgatgataaggcctatcataaaaaatatccgactatctatcatctgcgcagtgaactgattcattctgataaaccgcatgacgtcagactcgtatatctggcaattcatcatattatgaagtataggggacatttcctttttgaaggttcccttgatacagagtccacttttgacaatatcatgaaaagcttctgcgaagaggtagaggatagtctgggcatcccctttgattgctccgagttgcccgtgataaaggaagtcctctgtaatcgcggtatcacgagaactgaaaagcagaaaaaactcttctctctgttcgattgtaaatccaattcacagacggcggcccttctcaagatgataaatggatctgttgttaaactgaaggatgttttcccggttggtgaggagtcagaagaggaaatcaagattgagtttggaagcgacagctatgatcaactgattccgaaactggaagttttactggcggatgactacagtatcctttcaaaagcaaaagccattcatgactgggcgctgttggaggggatccttcatggaaaagaatatctttctgatgccaagaaggatatctatgatcagcatgcaaaagaccttcgtctgctgaaaaaactgattcgccgttattgtccgaatgaatatgacagcctgttcaaggatccatcggatgataggaattattgcgcatatgtcggagttgccaaggtaaagggcaaaaaggttcctgttgttaagagctgcacacaggcggatttctgcaagagagtgaagtcaactctggaaaagataaaagcagatgatcctgaactggaagaagccagggcaaggctgtcttccgaaaacttcatgcctaaactcaggacgaaggataacagtgtagtaccaaaccagcttcatcttaaggaattgaaaaagatactgcagaatgctgagaagtatctgcctttccttaagtccgcagatcaggatggtactacagtagaggaaaagattctccagatactgacattccgtataccgtattacgtcgggccgttgaatgacagggatccgaaagcgcagaatacctgggttgtcaggcgttcccacgaaaagatctatccatggaattttgatgagattgtggacagggaaatgagtgcggctgcatttataacgcgtatgacagcgcagtgtacttatttgaatgatcacacagtgctgcctcaaaactcccttctttatacacgctttatggttctgaacgagttgaacaatctgaagattgacggtgaaccgattagtgtttcgctgaagcaggatatttaccgggattgctttgagacgcattcaaaagtcagcatgaatgttctgttgaaatatcttaaaaccaggggaatgttgatagagaaggatcaggtcacaggaattgatggtgatttcaagggatccctgaaggtgtggagagagatgcgggatctgctgggggactgcttcactattgaaatcgcggaggagattgtccggctcagtacgcttttgggcgaagacagaaagatgttctgcgagaaactgcgcaaagagttcagacaggagttgccggaagaggtcattatccgggcatctggcaaaagatatacaggatggggacgcctttcgaaggaatttctgacatgcattcatgacgatcattatgatccggagactgcggagtatccgaatatcattacagccttgtgggagtcaaatgaaaacttgatgcagctcctgggcggaagtcacggatttgccgaagcggtccgaaagtataacgaaacaaattcacaggactatggattctcttatcagacggtaaaagatttgtatctgtctccgagtataaggagaagcgtctggcagacgctaaggattgtcaaggaaatcaggggaattaccggtcatgatcctgaaaaggtgtttgttgaaatggcgcgtggcggaggagaaaagaataaacggacacagtccagaaagagtaagttgcttgaattgtacaggtcctgtaaagatgaaacaagggactggatgctggaactgaacgcccgtgaggattctgattatcgcagcgatcggctgtatctgtattatacacagatgggccggtgtatgtatacgggagaaagcattgacctggatcatctgtttgatgcaaatgtgtatgatgtggatcatatcttccctcagtccaaagtgaaagatgacagtattgataaccgcgtattggtgaagcgtgtggttaatgccgaaaaaacggatgtttatccgatagacaagaaaatccggaataatatgcattccacatggagtatgttgctgcagaagggttttatcagtaaaaagaaatacgatcgtctgttacggggaacgaaactgacagatgatgaattgtcagattttgtttcacgccagttggttgaaacccgccagagtacgaaagcagtagcggacatcctcggccatctgttgccggatacggaagtagtatatgtgaaggcaagtctggtttctgatttccgaaaggaatatgatctgttgaagtgtcgtgaagtgaatgatctgcatcatggaaaggacgcctatctgaatattgttgtagggaatgtctataatacaaaattcacaaaagacccgcgtaatttcttcagggaacaggatcatacgtacagcctgaataaaatgtatcagttcccggtcagacggggagaaacagttgcctggcagcctggtgaatccgggtcaatcacagtgatcaaaagcatgatgagaaagaataatgtgctggtgacacagatggttgttgaaaagaagggtcagctctttgatttgaacccagtgagaaagaatcactggcagttacctctgaagaagggaatggcatgcctcgccgatccgtccaagtatggaggatacaacaatgtcaaaggcgcatacttcatgatggttgaaagtattgaaaaagggaaggccaggcgcagtattgtggatatgcctatccatctggccggtattgatccggaagacccggcggtcatagagatgcttgtccgggacaaggggttgaatgagcccaggattcttgtcccgcatattgggatcaacagcataattgagattgacggatgccggatgtatctgaccggtcggacaggcaccaatctggattatgcacttgcacatcagctgatacttggatatgagaatgaattgtatctgaggaacatactgaaatattgtgaccgggatatggaatactcgcatacacatcgtaacgaggaattgaaaatatcggaatatgatgggctttctgcagaagagaatctgaaactgtatgatttgtttgtttcaaaacttgaaaacacggtatacagagtcagactctctgcacaggcggaaaatctgaagaaagccaggggaaggtttgaagagttgtctgtagaaaaacagtgcaaatgcctgaaacaggccctgaatttgtttacatgtaataaggtgaaagcagatctatccatcatcgggctcggttcacagctgggctcaatccgcacagcacgctgtatctcaaattatgagtctgtatggatgataaatcagtccgtgacgggcttgtttgagtccaggagtaacctcctgtcatga

SEQ ID NO: 184 - DNA, 4032 bp, unidentified
  misc_feature 1..4032: note = Synthetic sequence or unknown origin
  source 1..4032: mol_type = other DNA
atgacaaaatttaataaagattattacgttggattagacgttggtactgattcctgcggttgggcagttacagataccgattataatcttgttaaaaccgcagggcacgatttttggggcagttatatgtttgagaacgcgcagactgcggaagaaagacgtttaaacagaactgctcgcagaagaacggcaagagtgcacgaacgtcttatgcttttacaggaattatttgcggacgaaatatgtaaagcagaccctttattttttatcaggataaataacagccagttattcataggcgataaagataaggcgctatcgtctgcaaatattttatttgacgataaacattatagcgataaagattatttttatgagtataagacaatttaccatttgcgttcggaattaatagataaccctgtgaccgatattcggcttttatatcttgctgtgcatcacatcgttaagaatagagggcactttttgtttgaagggcaaacttttgacgtaaacgatcgcaagaatgttttgactaagtttgaagaaataaataattatttatcggacaacgatatgcccgtgctcgaattgacaaacataaatgaagtcctcgattgcattaaagataataatttgggtaaaaaagcaaagacgacaaaattaaaagagttatttggcataacaaaggacaaacagcagcttgcaattatcaatgcgttgtcgggctgtaatttttctgtaaataatttatattgcacagacgaagattatgaaatagaaaaaatttcctttgatgattctttatacgacgataaatttttaaaaattgaaaacgaggtcggcgcggataatgccgtgcttgtcagcaatttaaaagcgatatacgactgggctattcttagcaatatcgttggtgacagtaagtttatatcgcaagcaaaagttaaaatttatgaagagcataagtcggacctcgcctatcttaaaacttacataagaaacaattacgatatagatacatacagaaaaattttcagatatcataaaggtattcccaactattccgcatatataggaatggataagcaaaagggttactcaaagtgcagtaaaactgatttttatgcttttttgaaaaacacaataaaaattaacgatgattatattttaaaaaagatagaggatggcaactttttacctaagcaagtttcttctgcaaacggggttattccatatcaattgaattatgccgaacttaaagcaattttaaataatgccgaaaagtattttccgtttctcagcaaagagcaggacgggctcacggtaagtcaaaaaatattgatgttgatgaggttcaaaattccttactatgtaggacctttaaacgataacaataaaaaatttgcttgggttaaaaaatatgacggaatgcaaaatattaaaattacgccttggaactttgataaaatagttgacctagacggaagtgaagatgcgtttatccgcaaaatgacaaataagtgtacctatattcaaaccgaggatgtcttgcctgcaaattcgcttttatatagtcagtttgcatttttgaatgagctaaacaatttaaagataaacggcgtaaaggatatgcgtgctagggatattatatttgagtatgcaaagtcgcataaaaaagtaacgctgaaagcttgtttaaatttattacaaaagaatgcaataatttcgaataatagtactaccgatatttttagcggtacggatggcgattttaaatgttcgttagcgccttttgtcgatttaaaatttctcggtgacaaactgtatactaagccgcaaatgtgtgaagagataatattatggataacgctgatttcggataaggacaggcttgcaaagcgcataaaagaaaagtatggcaaatatcttacggaagaggaaataaagaagctaaaaggtttaaattacacaaagtggggcagactttctaaaaaacttctttgtgaaattaaaagcccttattgcgttgacgagaacggcgagtgtttgagtattattcaggcaatgtttgctacgggtgaaaactttatgcagttattgtcgggtaagtatggttttgcggacagcattaaagagtataacgaaagtattagtcagtcaaccgccgttacttataaaaccgttaaagaactatattgttcgccgtctgtaaagcgagctatttggcgcagtttggatatagtaaaagagatagaaaaaataataggcaaaccgcccaaaaagatttttattgaaatggcgagagaagttgacgataaatctaaaaagggtaagagaactacttcgcgcaaggaacagataaaattactgtacaaagatataaaagataatgagcgtgactggaaagaagagattgaagaaacggtcgacagcaaattcaatagcgacaagctagttttgtattatatgcaaaagggcatatgtatgtacacgggtaagcccattcgtttgcaggacgtattcaacacgaatatttgcgatatagaccatatttaccctcaatcaaaaattaaagacgacagcctcgataacagggtgcttgtttataaaacggaaaatagcgcaaagaatgatgtttacccgataagcagcgaaatcagacgcaatatgtcggcttactggaaagagctgcttaaaggtgattttatttccgaaaagaaatatgctcgccttatacgtaacacgccgctcacaattgaagagtgtaccgactttattaacagacagcttgttgaaacaaggcaaagcacaaagtgtcttgcacaaattttaagacaatattttggcgacaagtgcgaggtggtttattctaaggcgggaaacgtcgacaggtttaaacaggacaacaagattataaaaataagagaacttaacgatttgcaccacgcgaaggatgcttaccttaacatagttgttggcaacgtttacaatacaaagtttaatcacgatgcaagcgtttacttcaaaaagaatgacgtaaacagctataactttaccaaactttacgaaaaagatatagaaggcgcgtggaaagttgacgacaggcagaggataattgatacggtaaataaaaatacttgccgtatagtaagaatgactgaaagcggtaagggcgcgttatttaatgttaatcctgtttcgccaaatggacaagaggcggataaactacaaaattggattcctagaaaattgagactgacaaatactgataatacagcaatagccgatgtcgcaaagtatggcggatataccggtatcaatactgcttactacatgttagttaaatcggtagataaaaaagattataaattatcttttgttgcctatcctctttacttagaaaagctttataatggggctttggaaaataaattaaaatattgtctagaagcttttgatttaaaagaaccgcaaattgtattggactatattaaaaaatatagtttgattaatgtcaatggtaattattactatcttgtcggtggcgcaactccgactgtcaaaagtgttgagttcaataatgcttatcagttatatctcgaaaataaagaaatgcaaattttgaagctggtattaaaaagcttagacaaaaatgattctaaaaatataaataaagttatagttaatgagaacgtaaataaggatgataacattcagctatataaaacatttgtaaataagttgagtttgaatgtttattgtaaaataccaaatattcaaaatgtaattaaaagcttgaatgacgaggaaaatacatttgaacaaatggacttaaaaaagcaatgtatcgtactttctcaaatgttaaatattttatgcggacgtgctgcagatttatctttattaggaattaaatcggtttccgaaagaattagatttaccgtttctaaacaagataatataaaaattatctatcaatcgccgacgggctaccacaggaaaataataaatgttaaggatctgttatga

SEQ ID NO: 185 - DNA, 4035 bp, unidentified
  misc_feature 1..4035: note = Synthetic sequence or unknown origin
  source 1..4035: mol_type = other DNA
ttggaaaataataaaaaatataatatcggtctagacataggaacaacttccgttggatgggcagtagtagaatgtgaaaaccaaaaaataatcagaaaaggaaataaagctctatggggagttcgattatttgaggaagcaaatactgcagcagatagaagaaacaaacgaagtactagaagacgctatgatagaagaagagagagaataagattactacaggaagaatttaaagaagaaattaataaaattgattctaatttttttacaaaattaaaagaatctttttatcatgaagacgataaagaaaacaaaactattccattaacaaaagaagagaaagagacaatcaaagaatataataacaaatacaaaacgatctatcatttaagaaataagctaataaattctacagaaaaagaagatatcagattagtttatctagcaattcatcatattataaaatatcgaggaaattttctttataatagtgataacttcagtgtagaaaatttaaacttagagactcaaatagaaacaatattaaattcagcaattaatttttgtccatctttagaatgtccgacagactataaagaatatataaaaattaatgatctttctatagcacttttggattcttctaaaaatgatcgaaaagtaaaagttcaaaaaatattggaatcaattcttcctaaaatttttgtaagtgaatttataaaactaataaatggaaacaaattcaatattataaaaatgataggattagaaaatatagataaactggaaattagttttaatggaaccgattatgaagaaaaatacaatgaacttgaatccattcttggagattccattgaagtacttgatagtatgaaacaattatatgatatggtttttctaaaaaggttatttaaatcaagtgaaagcacaaatatttcggccttaatggttgaaaaatacgaattacacaaaaaagatttaaaatttttaaaatctattttagatattgatcgaaaaatttataataaaatttttaaaagtagaaaagaaatctgtccttacgaaaattacataaaaaataaaataactaatgaagaattcgtgaaggaaataaaaaaatatttaccaagtatttttgaaaaaaacatcaatcaagaactacttacctattatgaagctaacattcaaaaacgtatggagaatggagattttctacctcgaattactgataaagacaatggaaaatacccatatcaattaaataaagaagaattaatcaaaattattgaaaaccaaggaaaatattatccattcttactagataaaacaaaagatgatacttataaacttgttaaattattagagtttagaattccatattatgttggtccattgacagaggaaagtcatagtaaatttgcttggatgattcgaaaaaactataacgaaaaaattactccttataattttgatgacataatcgataaagaagcaacggcagaaaaatttataaaaagaatgatttctcattgtacttatttattagaagaaccagcaatgcccaataattctattctctattcaaaatataaagtaatgaatgaactaaagcaaattagaatcaacggaaaaaaaatgtcatgcgatatgcagaataaaattttaagaaatttatttatgactacaagcgggaatatcacagataaaaaatttaaagaatatttatatgctaataaggattttgatatgtatcaaggtgactttaatattacaggatattcagcagatggaaaatttgcaaatacaatgcaatcctatatagatttcttcggtgaaaatggaatctttagtaacactaattataccttagaagaggcagaacaaattattgaatggattacaatatttgaagataaagatattttaaaaacaaaagtagaaagggactacccattacttaatgattcccaaattaaaaaaattatttctaaaaaatatagtggttggggaagtttatgtaagaaattattaacaactaaatactatgttgataaggaaagtggagttacaaaatcaattatagatttaatggaagagacagaaaataatttcatgcagattatcaatgatgatacctataattttcaaaagatgattaaggaaaataataaaatagatgtaactcaaaaattaaattatagtgtagtcgaatgcctagcaacttctccctcaacaaagagaggtatctatcaagccctaagggtagtcgatgaaatcgtaaaatatatgaaaaaagagccagaggcaattatggtagaaatggctcgaggtgatgatcaaaagaaaagaaaagatgaccgtaaaaaatatttaataaaactatatgaaaaagccaaagaagaaattgaggattacaatcaactaatgcaacaactaggaaaatttgagaaaattgatagtcaaaaattatttctttattttatacaagaaggaaaaagtttatattctggaaaaccactgaatattgaagatttagctacttacgaaattgatcatattattccaagaactttaattaaagatgactcaattgataataaagctttagtatatagagaagaaaatcaaacaaaggccgctaactatattcttcccagggaattcagaagccaattcaatagagcatggtgggaacatttaaggaaaattgggttaatttcatctaaaaagtttcataatctaattcgttctgagtataaagaagaagaaatagaaaactttatcaatcgtcaattggtagaaactagacaaataaccaaacatgtagcaaatattctaaatagctattacaaaaatacacaagttgtctatttacatgctgatttgtcacataattatcgagagaaattcgagttatttaaatttagagatataaatgattatcatcatgcacatgatgcttatttggcggcagttttaggtgaatataaagaaaagtatttaaaatgtaaagttaattttgagatgctaaaagaattaaataaaagcttaattgaacaaaaagattataaaaagctgaaatatggatatgtaattaatagcttagatagttctatgaatgatgttatgaaagaagttgtttctattcactttgatgaaaaaactggagaagtactatttgatgcagaagagtttaatagaagagtagaagacactttatatcgaaatgatattttgattagtagaaaaccagaaataaaaacaggacaattatataaggaaacaatatattctcataatgacgcaaagattaagtcaggaattaaaatatctaaaacgttaccagtagaaaaatatggtttctatacaaatatagaatattcttatttagtattggtaaaagttaaagaaaaaaactatatgtttggtattccaattatgtatgacaataaaattgataaagcaaaatatattgaagaaaaattaaaagtaagcattgatgattatgaaataatatgtgataggattccattttatactaaaattaattatcatggacatctagcttatttaacaggtagtattgaattttggaatgcttatcagttaaagatatcaaaaaaatctatgaaaaaatggaaatacatgttaaattttgcattaaatgataagaaaatccctgttattgataaccaagaagttttaactgaacaagaagtaaataaacaaatgcttgaatttattaaatacttactatcattacatgaattatttcctttatataataatactttcaagaaactagaaaagatagatattgaaaatctagatatggaaaagaaaaaaatacttattaaagaattattaaaaatgttatcagcaagcagtatgaatgctaatttaaaagaatttggacttactgatagagaaggtagagtacataaatcaaatataggagaaggtacgttaatatataattcaattactggtataagagaaaaaacaattgttatagaaggaaaaagaaaatga

SEQ ID NO: 186 - DNA, 4041 bp, unidentified
  misc_feature 1..4041: note = Synthetic sequence or unknown origin
  source 1..4041: mol_type = other DNA
atggaaaaagactattatttgggattggatttgggaaccggctcagtaggatgggctgttaccaatgcaaactatgaagtattgcgggctcatggaaaagctctgtggggagtccgcctgtttgacactgccaataccgctgaagaaagaagaatatttcgtacttccagaagaagactggacagaagaaaccggagaattgaattattacaggaattattttcggaagaaatcaatcagattgatgccggtttttatcttcggatgaaagaaagcaaatatatgccggaagataaaagagatagcaatggtgaatgtcctcagcttccctatgcattatttatagataaagattttaatgacaaagactatcacaaacagtttcctacaatttatcatttaagatactggctgatgaccacagaagaaactccggatatccgtctggtctatttagcactgcatcatatgatgaaacataggggacattttttgctttccggagatattgaaagtgtcagagaatttaaaaatacttttagtcaatttattcaatgcctgcaagacgaagaattggattttaatttagaaatatccgatgataaatatgtcatgatagaaaatctgttaaaaaaccatacaatgaccaagtcagcaaagaaaacccaattaataaaattattaggtgcacatactccctgtgagaaagctgtcctcaatatgatttccggtggtacggtaaaattaagtgacctatttacggatgcagagtatgacaatctggagcggagcaaactttcattttctgagagtacttatgatgattattccggtacactggaaagtgatttggaagaacatttcattgttatagaaaaagcaaagatggtatacgattggagtgttttggtagatattttaggagattatcagtctatttcagaggcaaaaattgcaatttatgaaaaacataaaaaagatttggagtatttaaagaagctggtaaaagagaaatttgatgcaaaacgttatcgggatatatttgtcataacagacgaaaagacagctaattattgtgcctatatcggaatgaccaaaaagaatgggaagaaaattgcattggaaggaaaacaatgcagtaaaagtgatttttatcaatatttgagaaaaaatgtattaaatgagctgggtgatgatgcggatgcccaatatctgaagaatgaattagataaggaaacatttttgccaaaacaggttacgaaggataatagtgtcattccttatcaagtgcatttatatgaattaaaccaaattcttgataatttgtctccaagacttccgatattacagaaaacgggcgaaaaaatccgccagatttttactttccgtattccgtactatgttggaccgttaaacggtattactcaaaatggacagcggacaaactgggctgtcagaaagaatacagaaaatggcaaagcagaaaaaatatatccatggaactttgatgaagtaattgatattgaagcaagtgcagaacaatttatccgcagaatgacaaataaatgtacttatctgatacacgaggatgtattacctaagtattctttgttatacagcaaatatgtcgtattaaatgaattaaataatctgcgattggatggagaacctattgatgttgcactaaaacaagagatttacaataatgtatttgaaaaatacagaaaggtaacacaaaagaaattaaaggattacctggtgagggaaggacatctgtcaagagagaaagctgcaaagctggatataacaggtatagatggagattttaaagggtctttgacagcatatcatgactttaaagaaaaactgaccggctgcaatctgagccagacagataaagaaaacattattttaaatatcacattattcggcgaagataaaaaactattaaaacagcgtctttctgccctgtatccgcaattcacagataaacaaaaagcagcactatgctcactgcaatatagcggttggggaagattgtccaaaacatttttggaagggattgctgcacctgcaccggaaacaggagaagcctggacaattatccggacaatgtgggaaaccaatgataatttaatgcaggtattaagtgaaaaatatcagtttgccgaagcaattgaagcagaaaacgggaaaaatgaaatacaggggatttcctatgagcttgtagagcaactttatgtctcaccatctgtaaaacgtcaaatctggcagacactacaaattgtcaaagaactttgcaaagtgatggagaagccgccaaagcgtatctttgtcgaaatggcaagagaaaaagccgaaagcaagagaacagagtcacgaaaaaaggtattaattgatttatataaaaaatgtaaagatgaagaacgtacatggatagaagaattgagcaatacacaagatactcgtttccggagcgataaactttatctctattatacacaaaagggacgctgcatgtattccggggaaccaatcgagctggaaaacctctgggacaataatcaatatgatattgaccatatatatccacaatccaaagtcatggatgatagtttggataaccgggtattggtcaagaagacttataatgcagaaaaaaccgatgtttatccgattcgtgctgatattcgtgagaagatgaaagcattttggaaatctctgctggccggcggctttatttcgaaagaaaaatataatcgtctgattcgttctaatgaatttgaaccttctgaactggcaggatttatccagcgtcaattggtagaaacaagacaaagtacaaaagcagtggcatctattttgaaacaaatattgccggatacagaaattgtatatgtaaaagcaaaaattgtttctaatttcagacaagattttcaattgcccaaagtaagggaaatgaatgatttacatcatgcaaaagatgcttatctgaatgttgtagttggaaatgcatattataccaaatttacaaaggatgctgtgtggtttatccgtcataatccgggaagaacttacaacttaaagagaatgtttacctcttgtgacattgaaagaaacggagagaccgcatggaaggcgggagaaaacggaacaatttgcattgtgaaaaaaacaatgaataagaataatattctggtaaccagaaggtcatatgaggtaaaaggcggattatttgaccagcaattgatgaaaaagggaaaaggacaggttcccattaaaggaaatgatgaacggttaaaaattgaaaaatacggtggttataataaggcaacaggtacttattttatgcttgtggagtcagaagataaaaagggaaataaaatcagaacaatcgaatttgtcccattgtatttgagcagtgaaattgaagcgaatgacagttatgcagtgagatatctgatgcaggatagggaattaagaaatcccaaaatattattgcctaagataaaaattgacagtttatttaaagtagatggattttatatgtggttatccggcagaaccggaaatcaattaattttcaaaggggcaaatcaattgattttatcggcaaaagatgccggcgtattaaaaaaggttctgaaatttgtgagcagacaaaaagaaaataaaaatttgaaactggttgcttttgatgaactggatacagcagatctaatcgggttgtatgatacctttttagataaaatccaaaatactgtctatggaatccgattaaaggcgcaggagagtaccctgatagaaaaaagagaagaattttgtgatttaacggatgaagataaatgtattgtactatcggaaatcctgcatatgttccaatgccagagtggtgctgcagatttaaaattaatccatgggcccggacatgccggtgttttggtattaaataataatattactaaatgtaaacagatttctattattaatcagtctccgaccggtatctatgagcaggagattgatttaatgaaactatga

SEQ ID NO: 187 - DNA, 4044 bp, unidentified
  misc_feature 1..4044: note = Synthetic sequence or unknown origin
  source 1..4044: mol_type = other DNA
atgaaaagctatatgcagacagcaccatattatatcgcacttgacgtaggaaccaattctgtgggctgggcagcaacagacaaggaatacaatcttttgagatttaagggcaattcaatgtggggagtgcgtctgtttgacgaaggacaaactgcggaagaaagaaggataagccgaacaacccgaagacgcctcaacagaagaaagcaaagactcaatacattgtatctgctttttaaagaagagctcgacaagatagaccccgattttgataagagaatgaaggaaagctatcttataaatgcggataaaactacaggtacaaggttttcgctctttgcagacccggattatacggacaaggattttgcaagagaatacaagacaatgtatcatctgcgtcaggaacttgtaaagtccgagaaaccgcacgatgtaagatgtgtgtatctgggtgttcaccatattttaaaaagccgtggacatttcctctttgaagtaggtgaaaacgcagaagaaaacagaagctttgcagaggtgttcgacgaatatcttatagcaatccgtgataatctgggcgttgattgctcagtgtctgacgtttcagaagtccataatatagtgtctgacaaaacaatgaagcaggcagaaaaaataaagggaatagtaagcctaatcagcgttgctcttgatgaactaacggaagaaaaagagcttaagaaacaaatcgaagcttttgcaaagcttattgtcggtgcaaatgttgatttgaagaatatgtttggcgatgatacactcaagggaagctttaaagtaacagcagacgttgaaggcgacgataaattcaaagacctcagcgacaaacagctatcagtaatcgcagcagctaaaagcgtgtatgaccagataaagctcgaggagataatgggctcaagcaactatatctccgattatatggtaagcaagtacgaggagcaccggaaggatatcaaagcacttaaggaatttctcaagagtaaaggcagaattgacctgtacaagagaattttcagcgaaagaaccaagggacttaataactatgctgcatacgtaggatatgaaggtcaggaaagcaattgtacagcagaaaacctcaaggactttctcaagaaggagctgcaggagtacaagtctgaaataccggccatctatgacaaaataaccgagggtaaattcgcaccaaaacttcgaacaacagataacggtgctataccaagctctcttcacaaaaaggagctggttaaaatactcgagaatgcgtctgcatatctgccgtttctgaattctaaggatgcagacggactgagtgtcaaggacaaaatcatatctctttttgacttcaaaatcccttactatgtaggaccgcttaataattcgtcggacaagtactggattgtaagaagcaacgagaagataacaccttggaattttgacagggttgtaaactgtgaagagacagctaaagagtttatccttcgtatgaccggaaaatgtacatatacaggcgatgacgccctgccgcttgactcgcttctgtacagagagtataccgtgctcaacgaaatcaatgtaatcaagattaacggaaagccaatttccaaaagaataaaggatataatatacaacgacctctttgtgaaaagctcaaagaaggttacgaagaaagctatacatacgcatctcgttaacctaggcgaaataacgaaggatgacgagataacaggtgttgctgatacacttacaacatcactgcagtcctatcataagctcagaaggacaatcgaaaaaggttattcaagcgaactgatagaagagctgattaaaagcattgtcctgtttgcacaggataaaaagctccttaagaagtggataaaagagaagatgccggatgcctccgacgaagacatcaagtatctgtcatcactgaagttctctggctggggcagtctgtcaaaaacgctcctttgcgatataatgggtaatctcaacaccgaaacaggtgaggttatgtctgtgattgacgtaatgcgtgaaaacagcgaaaatcttaaccaggtgctgtataactacggatttgaaaaggctgcaaaggaataccgtgaaaacaagtatggcagccaggataaaatatcagatattctcgatagtatgtatatttctccgaaggtaagaagaagtattcgtcaggcaatgaaaattgtagacgaaatcatcggtataaagaaggctgcaccggagaagatattcatcgaaatggctagggacgttgatggtacaaataaaaaggaacaaaccaaatcaagaaaagagcagcttatagagctgtacaaagcatgcgaggaggatagtgcaaagctgcttgaagtatgtggagaggaaggaattgagaggtttaaggagctgtataataatctcgaaaacatagaagacagcaagctcagacaggacaagctgtatctgtactatactcagttcggcagatgtatgtattcggatgaatttatccctcttgatgagctgcaggataagaataagtgggacatagaccacatcttcccacgttcaagaataaaagacgacagcctcagtaacagagttcttgttaaagctcagctcaataggtcaaaaacaaacgaataccctataaatcaggatatccgtgataagatgcgtgacaagtggcttgttctcaagaataagaaaatgataaacgacaccaagtactcgcgacttgtacgctcagagccgcttactacagatgagctttctgcattcatcaacagacagattgtggaaacacagcaatctaccaaggctcttgccacaatactcgggaagcgttgtccagatagcaaaattgtgtactccaaagcagggaacgtctcggatttccgtaagtactatgcatatcgaagcgaagagccgtatacagagtttatcaagtgccgtgaccttaatgatttgcatcacgcaaaggatgcttatctcaatatcgtcgtaggaaacctgtatgatacaaagtttaccgctgagtttttcaagaatatccacaatgaggaatactctctcaataccgaagctatgttatcatggcctgttaaaggagcctggattccggaatcaaaggataagacacaaggcacaatactgactgtaagaaagacaatgggtaagaataatattctctatacccgtatgccaagagaagagcacggaaaactattcaacctgacaatactcaagaaggaaaaagacagtaatagcggaatgccggttaagaaggacaggagcatagaaaactacggtaaatatgataaaataaaaggtgcgtattttgcacttgtcgagcatactgaaaagaaaaagcgtgtccgctcccttgaaccgatatttatctgcgataaaacggaatacgaaaaggataacactgccttctttgagagcaaaggattcaaagacccaagagtcatagtgcctaagatacatatggattctgttcttgagcttaacggagtgaggtacaacataaagggcaggtcagatgataacatcatatatggtcatatgtgccagcttgtccttgattcacgtgctgtaacagtcatcagaaatacaacgaagtatctccagcgcatgtcaaagcagaaggataagaaggagcctacaaggtatgacggcataacagcggaggataatatttatttaatgggctgcctgattgataagattgataaagtaaaggattataataaatctattaaatgttctagaataattctcgaggcagaaaagaagaatttcgagaatggtagttatacattgtatgaacaatgtgtatcaatcagtaaggcacttataggcttccgttgtaatcaaagagtgtcgggatacaatggttcaacaatcagaataaataagaaggtttcctctttgagttcagcataccttgtaaatcagtctccgaccggattgtacgagtacaaaatcgacctgttaaaagactga

SEQ ID NO: 188 - DNA, 4056 bp, unidentified
  misc_feature 1..4056: note = Synthetic sequence or unknown origin
  source 1..4056: mol_type = other DNA
gtgaatttaaaagagataccttactatgttggccttgattgcggaacaagttccgtaggctttgctgtaactgacaagaattacaatcttttgaaagccaaaaataaagacatgtggggctctcatctttttgatgaggcaaacacagctgaagctagacgaatccagcggaatgcaagaaaacgtttggcccgccgaaatgagagaattaaacttttacagtcaatctttgcagaggaaattgcaaaaatagatccaactttcttcattagactcaatgaaagcagcctatatcaagaagataggtccaaagacaatgatcaaccattttcactattcaatgacaaagattatacagacaaagatttcaaaatagacttcccgacaatttatcatttgagagccgctttattggatggatcaattacaaaaaaggatccacgctttgtatatcttgctttacatcacattgtgaaaaacagagggcacttcctttttccaggcgagagtttggcatctatccagaatattggaactattctacaagcattgaaagagtgttcttcttccatattcgaagaagatttaacattcggaagtcaaaatcttatagaagatgcactaaagataaaaaagaaaacagagagaatcgaaactttaaaaagcctcatcttctcaaacaacgacaaaaggaaacttctaattataaaggctattgcaggatacagcattcaaccaaagaacctgtttgaaaatgatgaatatgatgaacttccaaaacttgaattccaaaaatcctcattcgaagaacaggacttgccaaagctagaagaaacattacaagaagacgaatacaaattcgttgagtctttaaaagcactatatgactggtcactgttggcaaacataatggcaggaaaagactcaatatctaaagcaaaaatagatcaatacaacaaaaacaaacaagatttgactgttttaaaaaaagtaataagaaaatacttcacaaaagaggaatatgaagcgtttttccactcaaataaggaaggatcattctctaattatattggttctataaattcaaaacatcttgcaaaaggtccggaacacaaaactcgtaaacgcgttaaacgcacaaacacagatgtcttttatgctgaagtaaagaaaacattgaaaaaaatcactgttgaagactctgatgttaaccagatcctcagcgatatagaaaacgataattttcttcctctgcttagatctttcagaaatggagtggttcctttccaagtgaatttggcagagttaaaaggaattcttgaaaaatcagagggctatcttccatggctagagaaaaaagatgaagatggattatctgcagaagataaaataatttccataatgaaattcagaatcccatactatgtcgggccacttgcagatccatcaaagaatagaaatgcttggttggccaggaaagaatcaggcaggattctcccatggaacttcgagaaaaaagtcgatgtaggtgaatcagcagaaagatttataatgagaatgacaaacaagtgcacataccttccagaagaagatgtcatcccaaaacaatcacttctttatcaaaatttcatggttttgaatgaaataaacaatcttaaaatcaactctgaggacattagtgtcgagcaaaaacaaaccatttactacaagctattcagaaaaggcaatgtcacacagaagaaaataaagaatcttgccataacagaaggttgggtacaaaaaggtgatgatttgatactatctggcattgatgacactataaaagcttcattatcatcatacattgcatttgcaccatatcttgaaagtggcaagctgaatcaaaacgaagtcgaggatatcattcgatggctaactctcttttcagatggtggcgatattgcaaaaagaaagattgaatcaacattcagcggaaaactatcaaaggatgatatcaaagcaatatctagaatgaaattcagtgggtggggaaatctgtcgaagaaattccttactggaattgatgcaatcgaccccgaaactggtgaatacaaaaatataataagacttctttgggataccaactacaacctcatggaaatactccataatcctgaatgcggaatcctagaacaattaggtaacaaagaacccatcgatagcctaaattacagcatccttggtgacttaagaatatctccaaaagtaaaaagacagatatggcaagctttgagaataacaaaagaaatagaacatatcatggggcacaaaccagaaaaagtatttatagaggttgctagatatgagggagaaaaaggtaaaagaacaaaaacaaggaaagaccaacttctagagaaaatcaaaaaagcgaaagatcccgatgacaatgagattttgaaatcactagaaagcgaagatgtttctatgattacaaaacgagaccgattatatctttactatacacagctcggtaaatgtatgtactcaggtgaggatatagacttggatgatctccttagcaaaaaatacgacatcgatcatatctatccatactctaaatcaaatgacgattcactaacaaataaagtaatagtcaaatctgaattgaatacggaaaaacgcaatgacttccctatcaaagaagacataagaatcaagatgaacaaattctggaagaagcttttggaaaaagagctgatatcctctgagaaatatcacagactcaccagaaatacttcattgtcggatgaagatttaaaaggattcatcaatcggcaaatagtagaaacaagccaaagcacaaaagctttagccgaaatattaaagcgttattttggagaagaaacaaaaattgtttattctaaagctggcaatgtatctgatttcagaaaggattttgatttacctaaatctagaataatcaatcaccttcatcatgcaaaagatgcttatttgaatatagttgtaggaaacacattatattgtaaatatacatcagcatggttcttgaaaaacgtcaacttcaataatccatataagtataatgttgaaggtgcctggattgctgatagcaataaaaccatatcacttgtaaaagcaacaatggataaaaacacagttctctttactcgacagccagaaatgaggacaggtcaactttttgacttaaatccaaaggccaaaggtagtgaaaaaggaatgattccattgaaaatgattcctaaactaaaagaacaactctcaaaaaacacaaataaagaggaaataattaaagcctggactgacaaatatggaggctacaatagtcttgctgtaagccattttgctttagtaagacacttggaaaagaaaaaacaagtctacacttttgtaaagattatcgtcatcagagctcaagagctgttggataaagaaaacctgctcaaatactgtgtcgaggaactaggctacaaagatgttgagattatcagaacaaaagtcctattcaatacattattatctgtagatgacttcctgatgacaattacaaatagtatgaataagggtgcaaccttgggaaatgaatcagccataccccttatattagagaacaaatatgttaagtatgtgaaaaaattagaaaagttcacaaatgcaaaacgcttagataaaaatcttctaatagatgagaagtacgatgaaatatctcgagaagaaaatattgagttatatgaattgctactaaagaaatgcaagctttatataatgagaaaccgtccaggcaattctacaggtattattgaaagaggcgaagaggtttttacaaatcttccaatagaacaacaaacacaaacattgatgaacattctaaactacctttcaatgggtaatggatgcactgacttcagtttaataggtggaggaaaagcaaatggaacattaacactcagttcaacaatagatccttcgaagaaaaaagtatgcatctttgatcaaagtataaccggaatatatgaggagagattaaaactggaatga

SEQ ID NO: 189 - DNA, 4062 bp, unidentified
  misc_feature 1..4062: note = Synthetic sequence or unknown origin
  source 1..4062: mol_type = other DNA
atggaaaaatattataatattgctttagacttaggcaccaattcagtcggttgggcagcgattggccccgattacaaggttgtaaaaaagggagataagcatttatggggcgtagtattattcgataaaggggaatctgccaaagatagaagagtttttcgtagtactcgaagaagatttgaccgacgccgtaaaagaatagaattattaagaatgctaatggcgggatcaatcggcaaagaagatcctaccttttttagacgattagattcgtcgtttttgtgcaacaaaaataaagacccaaattctacaaggcaatatcactataatatatttaacgacacctacactgacaaaatatactataaaaaatatcccaccatatatcatcttcgcaaaacgttgatggaatctgacgaaaaagcggatatacggctcatatacctcgcaatacatcacattattaaatataggggaaattttttacatgacgaagatgccattaccataagcggagccggcgttatatctttattagaagaaacgttttctgcattaaagacattatctgacgatttcttaaacgctgatgcagaagcgttctatcgtattttatcaaataaaaatctctcaaaaaaagaccgtcaaaaagaattgcttacacttattggcaacacacctttatctaaagtgttggtttctttgcttttaggttataaagtcaaatcaaacgaaatagtctccgcattttcgttgtcactagacgaagattgtattttgcagtttggaacggacgacaccgaagaacaacttgctacactttctaatttattgaacgatgatcaaatagattttttaaactgtacgtataaaactttttttgaaaacaactttatagatattttgggagaaggcaacgtttacgtttctgatcttatgatccaaagatacgaaaagcacaagcaagatcttaaacttctaaaaaatgtattggtgcaaggaagcgacgaatacaaagcaatgtttagatccccacgccaccaaaaagaaggaaaaaaatccgacaaggagaataaatcatccaataaaaaagtaaaagtttttaattatgcttgttacgtaaaaaccaacaccaagcaaacaaggtatcaaaattcttgcactcaagaagagttttatgattatgttaaaaaggttttgagtaaatttgaagactcagcaaataaaaccgccatccttaacgaaatagaaaaaggctcttttatgccaagaatcaacgatattacaaatgcggctataccttatcaattcaataagaatgaacttgtagcaatactagataaacaaggtaaatactatcctgaattttataataataaagataaaataataagtttgcttacttttaaacgcccatactcggtaggtgtattaaaaggacctttttcttggatagatcaaacgatagatggtaccgtctatccttgggattttgaacaaaaggtagattatgatatagcaaacgctaattttattaaaaaaatgttatccaaagatcctttctttgacgaccaatacgtattaccaaaggattctatcacctatcaaaaatacgtggttttaaacgaactaaacaatattcgaatcaaaggcaaacctttggacgtcacccttaaacaacggttgtttgacgatctcgtatgtcaaaagacgaccgttagcaaagcagacataataaaatttattaacgtttattataaaggagtaaatattgttgctgacgacataaaactttccgacgacaaacttcttggcagtatgcgtacattagttgattttaaaaaaatattgggaaatgattttaccgaaaaagatattcccctatacgacaaaattgtagaaagtattgctattttcaacgatataaaagtacgccaaaaagttattaataatctatttgaatacaagccttatttaaggaaatatactgttttgtttagcaaaaaaagatattcaaaatggggcaggtattcttatagaacacttgttgaagaattaagcgaagagactacaccacgtagtatattggatataatgtatcaaactcaatacaatataaacgagatactttacggaaaagagtttggttttattggacgcaccgtaggaaaacaagagcatattatcccaaattacgaaaatcttattgatagtttatatgcggacgcaagcgttaaaaagacggtatggcaagcatacaaagtcgttagagaaattattgaaattataggcaacgagccagatcatatatttgtagaaacaacaaaagaagatgatataaaaaagaaaaaagattctcgcaaaaaactacttgattacttatattcggcgatacaaaccgacgttgccgaatacaacgcaacacttaaagaaataaaaaagcaaaaatcgaccgttgccgaagaattattttccaacgaaaaagttttcttatacttcttacaaatgggaagatgtatgtattccggaacgtctctatctttagatcatttaagcgaatacgaagttgatcatataattccccgaagtttggtcaaaaacgatagcatagataataaagtattggtacttaagcaagaaaatcaacgcaaaaaggagcttgcaataagttttgcggtacgtaaaaaaatgcaaccgttttgggcgtttttaaaagctaacaagatgatatcgggttataaatataataacttaatgaaagacgaatataccgacaaagacgttgcaggctttataaaccgtcaacttgtagaaaccactcaagcaaattcctgtttccaacaagttataaaaaccgcattccctgatcgtacagattacgtgttgccgatccgtgcaggtcttagtagagaatttagaaaaaagatggtggataaagacccaaaacaatatggtagttttataaaaattagatcgttaaacgatttccaccatgcaaaagacgcatatcttgccgctgttcttggaacgtttacgaccaagtattatcgagcgtggggcaacgatgataggatttttgcgaccaaaaagataatggaaacaatgcaaagcgaaaacgagtttaaaaaacttctttctcaacgttatagttttatactcgatttgcttgaaaacggggactacgaaccgaccaattccgatggcgagccgatccccgttgacgtagcgtttgagaatatatgccgtcaaatggattataacgatattgcagtgttcaaagtaaaagaacgccaagcaagtaacgcattttataatatgaatccgcttaaggcaggggaaggaaagttacccttaaagtatgttaaggacgcaaacggaaattctataccgttggaccctgctctttatggtggctatagtggggaacaagacgcttatttcgtttggataagttacgataaaggcaaaaaaagagaaacccgtttggaagggatacccgcattgatcgcaactcaagcaaagaccaacgaccaagcaattaacgactacttcgtctcactaaacctaaaaaatttttccgtagaaagcgtccccgtttataaaaatcaattaattaaactaaacggtcaacttgtctacatagtagcaagtggggaagttgcaaatgcgacgcaactcgtagttgataaaaaatatcacaaactattaaaaattgccgaaacgaaaaaatatgcagaatcagacatagcccaattaaacgaagatgccgttgaatttgttactcaatacgtagaaaaacttgaaaaatactacggcttatacaaaacgattgccgaaaaagtaacagagtttttaacgacgggatttacatccattgatctcgatgacaaattgacgtatatatccaatctattagtggtaacaaaatcgggatcgagcagaataaatatgcctaaggaatggaacggcggatccgattggggcagattgtccggaaaaaccatttataaaaaagacgtacacctttatcatagttctataaccggatattacaaaaaataa

SEQ ID NO: 190 - DNA, 4065 bp, unidentified
  misc_feature 1..4065: note = Synthetic sequence or unknown origin
  source 1..4065: mol_type = other DNA
atgtactatggaggaatcgatttaggaacatcatcagtgggatgggcgttgacagatgtaaattataatctgatacgccaaaagggaaaggatttgtggggagtaagactttttgatgaagcaaacacatctcaagaacgcaggattcatcgagtgtcacgtagaaggcgcgcaagggaagttgccagaatcggaatggtgaagagctattttgcagaggcaatagaagcagtagatgccgggttttatcagcgtttagaggagagtaagtatcatagggatgaaaaggcgtctgaatctaagtatgctatatttgctgatgatgattttacggataaagagtattatcaaaagtatccaaccatatatcatttgagaaagaaattattagaatcagatgaaacacaggatgtcagattagtatatttagctgttttaaatttgtttaagaatcgcggtcatttcttaaattcttacattgcagaagatggaaaagaagaaagtttttctgagttatattctgtgttttggaattctataccggaagaattggcaatggttttccctgaggtgattgatgtacagaaggtagaggagatattaagcagtaaggtttattcaagaactgttgcaacggaaaagttggctgaagtgttacaagtatctaagactaataataagtcatcgtatgaaatcgttaagatgttatgtgggctgtcaggaaagcttgctaatatttttgctaaagaagttttaggagaagtgtatgagaataaaaatcttgattttcgtggcgattcgtatgaagaaataataggtggtttgtcagaaatattgccgggtgaatatattgatatgcttgagtgcgcaaaggctgttcatgataaaggggtgttgggaagcattttaaaagactatacatatctttcgcaggcaagagttgcaatatatgataagcatgctgaagatttgagaagattaagagtagtagtgaaaaagtattgtccggaatgttatgatgattattttagagtgatgtcgattgataattacagtggctatataggttctgtttgttcgggaaaggagaaaatacgaagaggtggtcatgatgcaaagaaggaggcatataagtctttttggaagaagactacggaacttttaagtaccatgccggaagatgatgcggatgtgatgtatttaaagggtgaattacagaaagatactttgttgccgaagcagaagaccaaagagaactcggtgattcccaatcaggtccatttaaaggaactaaagaaaatattgtctaatgtagaaggttatttgccatttttaaaggatgtggatgaaagtggtttgacagttaaagaaaggattataaggctgtatcagtttcagatcccatattatgtaggacctttacatattaatgcaggtgaagaaggaaataagtgggtagtaagaaaggagaatgggaaggttcttccatggaatttagaagataaggtagatatggcagaaaccagaaaggcattcatagaacgaatggttagacattgtacctatttgtccggtaaaaatgttttgccgaagggatccttgttgtatgaaagatttatggtattgaatgagttgaataatgtaaaggtaaatggatgtaaattgccattggaagtgaaacaacaagtatatgaagaactgtttgctaaaggaaaaaaagttactttaaagaccttctgcacttatttgtacaattgcggtgtgatagataaagtggatacggagatgatttcaggtattgatggaggatttaaccatacgcttacatcatatgcacgattttgcagtgtatttggagacaaaatgaagctgtacaaatatcagaaaatggcagaagagcttatctttacagcgacagtatattcaaatgacaagacattaatgaaggaactgatagcaaagaaatatggaaatccggaagatgaggtatatatttccaaagaacaggaaaagaaaatactagggtttaagtggatggattgggggcgtctgtccaaggaatttttggaattaaagggttgctctaaggaggatggtatagaaattagcctgattcaggcaatgtgggaatgtgactgtaacctaatggaagctttaagcgataagtttacatttggaattaagttgttggacatgaaagaagggagagagaagttgctatccgattttacttatgaggatttacaggatagctacttgtcagcaccggtaaagagaatgacctggcagaccattttggttttaaaagaattgtgtcacgtaatgggagaagcacctgggaaattgtttgtcgagatgcccagaacggaaggggagaagggaaaacgaaccgcttccagaaaacaacagttaattgaactttacaaaaaatgtaaagaagagagtcatgattggatttctgaaatagatggttatacagaggatcagttaagaagcaagaagttgtatttgtactatacgcagcaagggagatgtatgtatacagggaatgcgatttcgttgggggatttattatcgaacaatggaaggtatgatattgaccatatttatccgagacattttgttaaggatgatagtcttgaaaacaatctggtgttggtagaaaaggaaagtaatgcatacaaaagtgatacttatccaatagatgcagatacaaggaatgcaagatatcggctatggaagagcttgaaggatgatgacttcatttctgaagaaaagtataaacgtctgacaagaagttgggagttttcggaggaggagttggccggctttattaatcgccagattgtagaaacagggcaggctactaagtgtgtggctcatttgttagaggaattattgcctgaaacagaggtggtatatgtaaaggcaggaaatgtatcagattttcgacgtgaaatgaatctgttaaagacacgttccgtaaatgaattccatcatgcgcaggatgcgtacttaaatattgtggttggaaatgtatataataccaagttcactaagaatccaattaattttgtcgttaattataagaaagatagcgcaaagtaccgttatcatatgtgcaagatgttcgagtatgatgtaaaacgtgatgcggtaatggcatggacggctggtgaaaaagggtctattgtaactgtaaaaaagatgatggggaagaatacaccattgttaactaaaaggacttatgaggcacatggagggattgcagatcagactctgtattcagcaaaagtggctaatgcgaataattatatccctctaaaggcaatggatgagcgcatgggcgatgtaacaaaatatggtggattttctagtgtgtccggaacctattactttttggttgaacacgaaaaaaagaagaaagtagttcgtacaatagagcaaatgccattatatttgaaagatgcattggcgacatcagaggaagctttgagacaatattgtgttaataggttgggacttcaaaatcctattattcggctgatgaaaattcctatgaaggctttggtaaagaggaatggatactggttgcgaattgcgggaagaacgggaaatcaattatatgcagataatgcagtttcaatgtgtttgaatttacattggattaactatatttacgatatggaacgttttttagagttcgggaaaacggaagatggaaaacatagtatatcgtacgagcggaatattcaattatacgaagaaatattagaaaaacatttgaatggtattttttcaaataagccaaacgaaataggaaataaactaaataacagtcatagtgcatttgaaaaattatcaataaaagagcaggttaaggtgctgttagagcttttgaaggctacacagtatcaaaatttgcgggtggaggcaaaggaaattgacttaaagatgagtcctatcaagatttcgaatgatgtattgggtcaagatgaatttctgttaattaatcaatcagtgacaggcatatatacttctgtgattgatttaagaactgtatga

SEQ ID NO: 191 - DNA, 4065 bp, unidentified
  misc_feature 1..4065: note = Synthetic sequence or unknown origin
  source 1..4065: mol_type = other DNA
atgaaaaaagttggagagtattatttgggacttgatatcgggacggattcggttggatatgcagcgactgataaaagatatgaattattaaagtataaaggaaagccaatgtggggatctcacctttttgatccggcaagtcaatgcgctgaaagaagagcattccggacagccagaagaaggctggatcgcaggcagcaaagggtacagttggcggatgaaatatttgcacctgaagtattaaaagttgatccgatgttttatattcgtcggaaggcaagcgcactctgcagagaagatcgcccggatatggatgatatcaattccagcttcaatgataaggagtataaggacaagcattttcatgatcaatatccgacgattcatcacttgattatggatttgataaacaacagggaaaagaaatttgatatacgtctgatcaatattgccgttgactggcttgtggtgcatagagggcattttcttagtgatgttggaactgcaaatattgaacgtgttcagaattttgacccgatttatgaggaatttttggcatattatgatattgaagatatagaaaagccatgggatgctgttgatgctgaggcatttgggaatatcttgaaagaaaagggcattaatcgtaagaaaaatgatctgaaagaacttttataccatggaacgatccctaatgatgagtatttcatggataaaaaagagcttgttaatttcctcgccggtggaaaagtgcagtgtaataagctatttcgcaattccgattttgacgatgatctaaagatgtcgataagtgatgaaatggaggtacttcttcctcagctgggagattatgcaacaattgtaggacggatggcggcaatgtatgactggagtgtattgtcggatatcctttcttcaagtgcatatatttcagaagcaaaaattaagatatatgaacaacatagtaatgatctgaagagattaaaaagatttgtaaagaagtattattcttcgaagacatatttcgaaattttcagagcttcatctaaagatctgaccaattatacagcatattcatacaatctgaaatctgttaaggatggtaaggagtatccgaaaaagaaggcaacaagggaagattttctggtatatctaaagaagacattgaatttggataatattgaatacgataaagatgatcaattgtttgtggaggaaatgaaggaaaggattggggatgggtctttcctcccgaaacaggttaattcagataaccgtgttattccatatcaattgtattatgatgaactgcgaagaattcttgaaaatgcatcacgacactatccatttctctctgaaaaagatgcagatggatacgtcaattcagaaaaacttctgtcaattataaaattcaggattccttattatgtaggcccccttagaaaagataacaattcgtttggatggatcgagagaaaagcagaaggcccaatacggccttggaattttgaagaagtgattgatattgatgagagtgaagctgcttttatcaggaagatgacaaattactgtacatatattccggggaaagatgtgcttcccaaatggtcgcttctttacacaaagtatacagtactaaatgagattaataatctcaagagtaacggaaaaggaatatccgttgaggcaaaaaaggcaatatataatgatcttttttgcaggtttaaaaaagtaacgcctaaaatgataaaagagtatctgcgagataacggttatatacagaagaatgatgaaataagcggaattgatgttcagattaatgcatcattaaaatcaaggcaggatttcaatgatgttttaaatcagggaattttgtctgaagaagatgtggaaagaataataaccagaaacacttattctgaagatacacgcaggtatagattgtggcttaaaaaggagtatcctaagcttaacgatgatgttatgagaaggattggaaaacttaaatatacagattttggacgtttatccggatttttcctttctgaattggtaggcgcttcaaaggaaaccggagaatccggaaccataatgtatttcctgtggaataccaacgagaatctcatgcagcttctttccgacagatacactttttctgatgaaattgagcagatccgaaacaactactatgcagagaataaacttggaataaatgaacagatggagagtcttggtatatcaaatgcagtaaagagaccggttgttcgtactttggcagtagtagatgatgtcgtatcaacacttggtaaggtgccggaaaagatatttgttgaaatggcaagaggagaagatgagaagaaacagagaaccgtcagcagaaaagaacagatattgaatctctatcgacaggtggaggaggatacacgtttattagaaaagcaacttgaagatatgggtgaaacggcaaacaacagcttacagagtgatgcgcttttcctctactacatgcagcttggaaaatgtatgtacagtggggaagctatagatctgtcacaaataaaaaaagataaatacaatattgaccatatttatcctcagagttttgttaaagatgatagtatcctcaataatcgcgtgcttgttttatcaaagatcaacggagataagaaggatgtatatcccatagataagagcattcgggaaaagatgcagccattttggaagatgctctgtgaaaaaggtttaattacaaaggagaagtataacagacttaccagaggaacaccatttaccgacgaagagaaaatgggatttatcaatcgtcagttggttgaaacacgccagtccatgaaggctgttacacagttattaaagaatcgttatccggatacggaaatagtttatgtcaaggcaaggcttgcttcagattttaaaaaggactttgatctggcacccaaatcaagaattatcaatgatctgcatcatgcgaaggatgcatatctgaatgttgtggcgggaaatgtgtatcatgaaaagtttacaaaaaaatggttccggattacggatacatatagcatgaaaacaaaggtgatttttgctaatgatctggaacgaaacggtgaagtgatctggaatcataaaaaagacctggagactgtgaaaaaaacatatgagagaaacaatatccatttgactaaatatgcgtatagtcagaaaggtggattgtttgatcagatgccagtaaaaaaagggagcggacaggtatgccttaagaagggaatggatatatccaagtatgggggatataataaaccaacggcaagcttcttcgtaattgccaagtatctaaagggtggaaagaaagaggtatcttttgtccctgttgacctgatggtaagtgaaagatttttagctgattataagtttgcgtgtgaatatataaaagatgttctggctggaatgaatacaaagaagatagaaaatgttgaattgccattcagaaacagggtagtaaagattaaatccacactatgtttggatggagtaaaggtttgggtgaacgggaaggcaaacggagggaaaatagtattactatcattagcggaaagtgcctattatgataatgattcggtttattatattggcaagatcgaacgttatgtagagaagaagaaaaccaatcggagactgcagcatgatgagcaatatgatgagttgtcagaggagaagaaccttaggttatatgatatacttatagaaaaaatgcatacaaaacaatttgcaaatatgcccggaaatcagtgctcagtcttgaaagagggaagagaattgtttatcaagaatgactttgattctcagattcagattcttgttaattgtgttaatctattaaaatcaggaagagcaggaggatgcgatctcaaagcaatcggtgggaaaaatgccagcggggtaatgacattaggggccaacatttcatcttcaaaatataaggacattcgtattattgattattctccggcgggactgcatttaaatgagtccgtaaatcttatggagctgtaa

SEQ ID NO: 192 - DNA, 4065 bp, unidentified
  misc_feature 1..4065: note = Synthetic sequence or unknown origin
  source 1..4065: mol_type = other DNA
atgataaaagattattatttagggttagatatgggaacaaattctgtaggatgggcagcaactgatgcggaatacaatctaatacgtaaaagtggaaaagacttatggggagtacgtgaatttgatgaagctgaaacatctgcggaaagacgtacacatcgcgttaacaggagacgacttcaaagagagcaggcaagagttgggttattaaagggtttcttcgcagatgcaatcaaaaaggttgatccaaatttctatcaaagacttgaaaatagcaagtattttcaagaagataaagatgctgaagtaaacggacctaatggaatctttgatgataaaaactatagggatgcggattattataaacagtaccctactatttttcacttaagaaaagaactgatccagaatgctaatgctccttatgatccgagacttgtgtttttagctatattaaatatgtataggcacaggggccattttcttaatgtcggactaagcggagacgggaatgaaataaccattgaagaagcgtatagcagtcttttaaatgctgtacaggattactttgggttatcactgcctgaaggaaaggcgaaagattttgaaaaagtattatcagataaaaatttatccagaaccggcaaatatgaaaaaatggcagagatctgttcaactcagaaaactgataagattaaagcggcaatacttaagtgtatctgcggtcttaaagttgatgccaaacagattttcacagagtttgaatctgaagaaaaagtagaaattgaattctcacgctataccgaagagtcgtcattgatacttaatgaaaagcttggggatgattattttgaatttattgaaataatgcatcagatatatgaccttggttcacttgtcaatattttaaagggtgaaacatatctttcgtatgcaagggttgaagagtatgcaaagcatcataaagatattcaggtattgaaggctctgtatagaaaatataaaacaaaagatgaatatgatgaaatgttcaggagcgatacgaaggggacgtatagtgcttatgtgaactcttataatactgagaaatataatatcaacggaaaacctgtccgcaggaatatgaaggaacgctccaaggatgatctatataagactattaagagtgcgttgaaggatataaaggataaagatgttgattatgtgctggaagaaatggaaagagaagcttttcttcctaagcagttgactgccggcaacggagttatacctaatcaggttcacgcaagagaactgaaggcaatacttaaaaatgcatcaaaataccttggctttttaaacgaaaaggatgaaagtgggcttaccgtagctgaaaagataagtgcaatattctctttccagattccttattatatcggaccggtatcagagaaaagtgaagccaacggaggcaacggctgggtaatcagaaaagaaaaaggaatggtactcccttggaatattgaagagaaaatcgatagtgagaaaacttctcagagatttatagaaagattggttaataattgtacctacatgtccggcgaaaaggttttgcccaagggttcattgttgtttgaaaagtattgcgtacttaacgagataaacaatataagaattgatggagaaaggatatctgttgaattaaagcaaaaattatataatgaacttttcataaccgggaagaaggttacgcgttcaaagatagaaaaattctttgtttccgaaggggtgatcaaagaaaaggaacagattagcggaatagataatcagattaataattcgctgtcatcatacggaaagttgatggacattcttggggatgacattaaaaccgataaaggtaaaaaactggctgaagatataatctacctggcaactatttatggggatgccagaaagatgttgaaggatagtttgaagaaaaagtatggagatattttatctgagaaccagattaaacgcatatccggcttacgatttaaggactggggctcattatccaaagagtttcttgaaatgaaagcttgggacaaaaataccggcgaagaagtcagcttgatcggtgagttgtgggattcaaacaataacatgatggagctaatcaacagcccggattatacttttaaagcagtgttgcaggagaaacagacaaagctgacaaaagtattaagtgattttacggtggaggatcttcaggagtattatttctctgctcccgtaaaaaggatgatatggcagacattgggtatcattaaggaattagagaagatattaggttgtgcacctaagagaatctttatagaaatgaccagaacagatgaggaaaagggagataagggcagaaaagattctcgtgctaaaactttattggagctgtataaaaatctcaaggatgagagtcgtgactggaaaaaggaaattgaagaggcagataaagacggtaagctgaaaataaaaaagctgtatctatattatattcagaatggccgttgcatgtataccggtgagcctatagatttagatgatctgtttaacgataatctgtatgatatagatcatatttatccgagacattatgtaaaagatgataatcttggcaataatatggttctggtaaagaagacatgtaatgcatataagagtgatgattatccgcttcctgctatgaaacctgatgtatatgaattatggaagagactttttagaactgggtttattaatgaggaaaagtataagcgccttacgggaaaacagccttttactgatgaacagaaggccggctttatagccagacagcttgtagaaaccggacagggaactaaaggtgtagctgacttgcttaagcagctgttgcctgatactacaatagtttactctaagggaagaaatgtatctgatttcagaaatcagtacaagttgctaaaatcaagaattgtaaatgattttcatcatgcacaggatgcatatcttaatatagttgtcggtaatgtatattatgtgaagtttacgcaggatccgctgaattatatgcgtaagttggaaaaagaaaagaaggcattttcttatcatctgggtaagatgtttgagaagaatatcaccatagggaatgaaaatgcctgggtagcatctgaaaaaaatggtgaatccggcacgatagtaacagtaaaaaaggttatggccagaaatacccctatgataacaaggttgaattttgaaaaccatggccggttttcaaaagaaacgttatattcagctagggttgctaagaaagataattatgttcctttaaaaatgaatgatgctaaaatgagtgatgtaactaaatatggtggttttacaaatgtgtacggagcatatttctttttggttgaacatgaagaaaaagggaaaaaggttaagacattagaaacagtaccggtttacctggctgagaaaattgctcgcggaaacggagcattagtgaaatattgtattgaggatttaggacttgttaatcctagaatatgtttagaaaagataaagatacaatccttattgaaaatagatggtttttggtaccatctttccggtaaaactggaaatagaattgttttaagaaatgctgtaagcttatgtcttagtcaaagttggattaattatattcatgccattgagaaatacaatgaaagcaagagaattccggatgaaattaaacgtgagaaaaacatcgaacttatagaaactttggcagagaagcatattgaaggtatatataaaaagagacaaaatccaatcagcgaattgataaaaaatgctaaagaggttattgaatcgctttcactggtagaacagtgtaatttgattattgagcttttaaaactgtcttgtattggattaacgtcggctgatttaagatgtattaaaggggctgaaaaaagtggcgtaatgctttttagcaagggaatatctaaagcgaatgagtttaaaattataaatcagtctattaccggtttttatgaaaatgaaattgatttgttaaagttatga

SEQ ID NO: 193 - DNA, 4068 bp, unidentified
  misc_feature 1..4068: note = Synthetic sequence or unknown origin
  source 1..4068: mol_type = other DNA
atggaaaacaaaaattattaccttggcttggacattggtaccgactctgtcggctatgccgtcacggacgaaaactataacttgctgcgtttccatggtgaacatgcgtggggtgttacgctctttgatgaggcggcactctgtaccgatcgtcgtgcgcaccgtacggcacgccgccgccttgaccgcagaaaacagcgtgtggacttgctgcaggaattgttcgcagtggaaatcggcaaagttgatccgcggttctttatccggttgcaggaaagtgccttataccgtgaagatgccggtgatgcatactccttctttaatgatgaaaactacacggatattgattaccacaagcaatacccgacgattcatcatttgattgttgatttgatgacgtcaagcaagccgcacgacgtgcgtcttgtctatttggcgtgcgcgtggctggtcgcacaccgtgggcatttcctgtccgacgtgaataaggaaaatatcagtgaactgaccgattttaccaaagtatacgataaccttttggcctattttgcggagaatgaattgccggcaccctggggtgactgtgaccgtgcagcgtttgccgacgttcttaaacgcaaaacgggtttatcttacaaacaaaaactcttggcgggcatcttgtatgctgacggcaaactgccaaagacggcagaagacgacccctacgccaaggacgttttgatcaaggctatttgcggcagcaaagtcaaatgttcggatttgttcaataataccgaatatgaagaactcgatacaaacggtttttgcctcggtgcagatgaagaaacgcttgccggcgtgatggcaaatctgtccgacgccgatgccgatttgtttgctcggttaaaagctacgtatgactgggcagtgttggtggatgcactgaacggacaggattgcatttcgttgtccaaagtagccgtctacgaccaacataaaaaagacctggcgacactcaagtattttatccgcaaatatgccaacgaaaaatatgccgaggttttccgcaagtcggctgaaaccaactacgtggcatattcttatcataataaaaacaagaatatcacgctgcccaagaaaaaggcaaataaagaggacttctgcaaatacgtaaaaggtattattgcagcctttaagggcaaagtggaagaaaaagatgccgctgcgtatgcggatatggtcgaccgcctggatctgttgacgttcctgcccaaacagcgcgatacggataaccgcgttatcccttaccagttgtattggtatgaactgaaaaagattatggaaaaggcaggcacgtatctgccgttcctttccgcatcggatgcggatggtatccgtacggatgagaaaattatggacgtctttacgttccgcgtcccgtactttgtcggtccgttaaacaaacattccaaccgcggttggattgaacgtcagcccggcaagatttatccgtggaattttgaaaagatggttgatttggataaatgtgaagaagcgtttatcaaaaaactcatcaactactgtacctatattcccggggaaaaggtgctgccgaaggaatcattgacgtatgccaaatttatggtactgaatgagattaataatctcaagatagacgaacagcccatttccgttgagctgaagcaaattatctattacgagctgttctgcaaaaagcgccgtgtcacgcgcaaagccctggaagagtatttgctttctaataatcatatggcaaaagggcagcacgtttccggtattgacgaacaaatcaaatcttccctgaaagcgtaccacgatttcaaacgtttgttggccaataaagtgttgaccgaagaacaggtagaagcaattattgagcgtatcacctacgtggaaaatccggcacgcgttcgagcgtggctcaagaagaactatgcattcctatccgatgcggacgtgacgtatattgcaaagctgaaatataaagatttcggccgtttgtcctatgcgtatttgaacggactggaaggttgtgaaaccgatagcgccaccggggaggcggcaacgattctgtctgccatgtggaacacaaacaacaatcagatggaactcatgtccgaccgatttacctatcgtcagtcagttctggatttgcaggagcaatactatgccacacattccaagacgttggcagaacggcttgacgatatgtacctgtccaatgccgtcaagcgtcccgttatccgtgccctggagattaccaaggacgtagtgaaggcattcggcggcgcaccggcgaaagtattcgtggaaatgacgcgcggggctaccgaggaccaaaagaacaaacggaccaaaacgcgtctgcagcaattgcgggagctgtatgaaaagtgtaagcaggatgcgcgcgacttgaatgcacaattggatgctatgggcgacaatgccgataactgcctgcagagtgacgccctattcctatactatttgcagattggtaaatgcctgtataccggcaataccattgatatcacggcattgaaatccggacgttataacattgagcatatctacccccaatcgcttgttaaggacgacagtatcattaacaatgaaatcctggtagagtccaatgccaacggcgctaagagtgatagttatcccgttgccgttgatatccaaaacaagcaaggtgcgctgtggtcaatgctgcatcatgcagggctgatgagtgacgaaaagtataaacgtctaacccgcaccacgccgttttccgcggatgaaaaaatgggctttatcaatcgtcagctgaccgaaacgtcacagtccaccaaggcagttgccacgttgttgaaggagctgtatcacacggaaatcgtctacgtcaaggcacgcctgacgtcggaattccgccaggaatacggtctgttaaaatcacgcaccgtcaacgatttgcaccatgccaaggatgcctatttgaatatcgtgaccggtaacgtctacagtatgcggtttacaaaacaattcttccgcattgacgaacagtatagtttgaacacgtgggccctgttcggccattccgtgatttgcggcggcaagactgtatggacgcctgctatgctggataccgttaagaaaacggctgtgatggatacggcgcatttgacgcggtacgcttattgcaaacatggtcccctgttcgacttgatgccgctcaaggcggggcagggacagattgagcaaaaggccggaaagagcgttgaaaaatacggcggatacaataaggctgccatttcgttctgcttgattgttgggtataagacggataaagccaaagacgttatgattatgccggttgaattattgtttgccgaccgtgtgcttgcgtctgctgattttgccgcaacgtatgcacaggataaaatcggccgtatgctgaacaaaccggtgcacgatatcacgttcccgtgcgggatgagaatgattcgaattaatacggtatttgcattggatgggtttagaggttattataccggaattacggcaacaaactggtgtttctcatcctttatgcctttatcattgaaaggtgaatggcagaattacatcaaacatttggagtcttttgctgagaagacaaaaaagaatccgggtttgacctatcaaaaaacgtacgataagatttcgtgtgaaaagaatatcgaattatatgacgttctttgtgataaattagcgaatagtatttatcagaagcgtcccggcaatcccgttgacacaataggaaaaggaaagagcaagtttgccacacttgacgtcaaggtacaagtgcaacaattgctttccttgttacaagtattcggccccacttcaggcggaattgacttgacgcaaatcggcggtgcagcaaaagctgcaacgacacgaattggcctttctattacaacgttaagccattcatttacacatagtatagttattattgatcaatcgccttccggtttatgggagtcccaatctatcaatctgcttgatttaattaagtaa

SEQ ID NO: 194 - DNA, 4071 bp, unidentified
  misc_feature 1..4071: note = Synthetic sequence or unknown origin
  source 1..4071: mol_type = other DNA
atgaaacagcaggaatactatctcggcttggactgcggtacggattctgttggatatgccgttacggatacggagtatcatcctcttcggttcaaaggcgagccgatgatgggaattacgacttttgacgcagcttctttgtctgcagaccgacgcgcaaaccgtaccaaccgcagaagactgcatcgcaggcagcagcgagtgcagttgctgcaagaagtatttgcacaagtgatcacggaagttgatccgaggttttttacgcgccttcgtgaaagtgcactttggcgtgaagacaagtccgatccatccgatccatatgcgctttttagcgacaatgggtttaccgataaggaatatcataagaaatatccgaccattcatcatctgatttgcgatctaatgcagtccacacaaaaacatgatgtacggttggtttaccttgcatgcgcatggttggttgcgcacagagggcattttctcagccccgtcaaggaagacaatatcagagaagcggtagatatcgcaattccgtatcagacattgatggattggttcgatgaagtaaagccgtgggatgcggatcctgcagcattcggttctgttctgaagaaacggcgatctgttcgtgataaagaaaaagagttttatgcacttttgtatgaaggaaaaaagccgtccgatctgttttccgatccggatgatccggatgcatttgccgtttctcgcgtgatgatgctgcgattgctctgcggcgggaaagttgccccgaaagatttattcccgtataaaacagataaatacgcagagctttcatccttctcgcttggcggcaaagaagaggaattggaggaaattctgctcagattggaggaagacggggaactggtgatccgactgaaagcattgtacgattgggctgtgctctctgatgtgctgcgtggggaaacctctatctctgccgcaaaggtaaaaacatatgaacagcataaacaggatctgaaatggctgaaagcgtttattaagaagtacgttccggatcaatacgataaggtgtttacggcggagcaggaaggaaactatccggcgtataccgatcatccttcggacggaaaaaccggcacgaaaaatgcttctaaagcggagttcagcgatttcctgaagaagattgtaaaggatatccctgttgacgaaacggatcggcagaaatacgacgatatgattgcccgtctggatgctaacacgtttttgccgaagcagaaggataccgacaatcgtgtcattccgtatcagctgtatgccgttgaattgagggatgttctgaagcacgcatccgcttatctgccgttcctttcggagaaagacgaaaacggcaggagcgcagctgataaaattgcacagattttccgcttccggattccgtattttgtcggaccgctgaatcgaaatagtgatcgggcatggctttccagaaaggaagggagaatcacgccgtggaactttacggagatggttgaccttgatgcaagtgagaatgcgtttatccgtaatatgaccggtcattgtacctatctgccgggcgaacctgttgttcccgcaaacgccttgtgttatgcaaaattcacggttttgaacgaattgaacacactgaaaatcaacagcgcgccgattacggttgcgcaaaaacaggcgatttataacgatgttttctgtaaatataaaaaaccgaccgtaaaggcgttgcgcaattattgtatctgcgaaggatttatgcccgcagacggcattctcagcggcatcgatatcgaaggcgggatcaaatccacgcttgcgccgttcttttcattcagaaacctgatggaatccggcatgctttcggaggagcaggttgaaaggatcatcgagcgcattacctgcacggaagatcagattcgtctgcgccgttggatcgacgcacagttcccgcaattgagcgaagaagaccgcaggtatatttcgcgcttgaaattcaaggatttcggacgcatgtcacatcgttttctctgcgaattacagggcgtgaacaagcagacaggagaggtctgtaccgttctgcaggcaatgtgggagacgaatgataatctgatgcagatcgtggagtcggatcaatatacctttgccgatgtcattcgtgaggaacagcgggagtattaccgcggacagccgtcttctttggataaacgtatggacgagctgtatctttccaacgcggtgcgccgcccgatctaccgcacgttagacattgtgaaggatgtggtcaaagcaaccggccatgcgccgaaaaagatttttgtggaaatggcgcgcggcggcacggaggagacgaaaggcaaacggacgcaatcacgcagaagtcagcttctggaactgtataagaattgttccgaggcagaggcgagagagcttgccgcactgctggaatcgaaaacggacaacgaactgcagagcgagaaactgtatctgtattttatgcagctcggaagatgcatgtacagcgggaagccgatcgatctggaacacctgaacgacaataagtattacgatgtggatcatatctatccgcagtgccgcgtaaaagacgacagcgttctgaacaataaggtgcttgtgttgtcaaaatacaacggtgacaagagcgacacctatccggttccctctgaatggcggcagacaatgtacgggtattggaagatgctccgcgagaacaacctgatcacagaggagaaattccgccgtcttacccgcgcaacgccgttcaccgatgccgaaaagtacggatttattgatcggcagctggtggagacgcgccagtcaacaaaagcgattacaacactgctgcaggaacggtatccggacacggagatcgtgtatgtcaaagcggggctcgtttcggaattccgtcatgagtacgatcttttaaaatctcgtacagtgaatgacctgcatcatgcgaaggacgcgtatctcaatattgtcgtcggaaatatctatcacgaacgttttaacaagaactacttccggatcgatcaggaatacagcctgaatacaaggcaggtgttcggacgtcctgtctatgtaaatggaacgtgctgctggaaaggcgaatccgatctcggacggatcaaggatattgttcggaagaatcatattcatgtgacgcgatatgcattctgtcgaagggggcagttcttcgatcagatgccgctgaaagcttctggggacggcgaacttctcccgcggaagaaagatttaccggcggagcgttacggcggctatcgcaagccgacggcttcgttcttcgtgcttgcaaaatactttgccggcaaaaagagcgatatcatgattgcgccggtcgaactgcttcgtgagaaggaattcgagaaagatccaaaagtgacggcaaaggaagcggttgaaaaggttctcggaaaagcggtagaccgtatcgaactgcctatcggcgcgcggaaactgaaggtgaacaccgtgttctcagtggacgggttccgctttgcacttgcggggaaatcaggtggcggcaggcagcttgggatttcgccgcttgctgctcttacaatcgatgccgatagcgaattctatctgaaacgtctggagtcgtttacaaacaaaaaggcaaagaacaaggaactgaagattcagcaggcatatgacaagatctctgcagaagagaacataaaaatctatgatctcttccaaagcaagctttcaacctatccgttttccaaacgtcctgccaacatattcgatgcggtggagaaaggcaaagaacggtttgaatctctgcctctggaagaccaggtaactgttcttgaacaaatattgctgtcgttcggtcgctccggcggaggaagcgatctgaaattgatcggcggcgtcgcaaaagccggtgttccaatgttgagttctgctctttcgaactggaaaaagaactatactgatgtccggatcattgaccaatccgcttcgggactctttgaaaaacagtctgtcaatctgtcggaactgctatga

SEQ ID NO: 195 - DNA, 4071 bp, unidentified
  misc_feature 1..4071: note = Synthetic sequence or unknown origin
  source 1..4071: mol_type = other DNA
atgggcagagattattaccttggattagacatgggcacaagttcggttggctgggcagtgaccgatgaaaaatacaatttgcttagggccaaaggaaaagacctttggggaattcgtgagtttgaagaggcagagggcggtatcgccagacgtcagaatagaatcagccgcagaaggcgtcagagagagcaggtccgtatcgggctgctcaagagttactttgccgaagaaatcgaaaaggtcgacccagactttttacaaagattagagaacagcaagtatcatttaagtgacaaagatgagaaagttcgatataagtctgctatctttaacgatccggaatacacagacaaagactattaccgagactatcctacgatattccatcttcgcgcggaattgatccacaaccaggaaccgcatgacatccgtcttgtttatcttgcgctcctaaacatgttcaaacacaggggtcatttccttaatgcatctctcagcgcagaagaggaaacacagtcgatgagtgatgcatatactgcattccgtgcattggtggaagaagtgatgactgccaatgagacagaaaaccttttcttcccggacgggaaagcggatgaaattgaagcgattatcagtagtcgtgattacaacagaaaacggaagtcagagctgatgacagaaatgcttggcttcacaaaaaaagataaagctgcgcaggcgctcattaaaggcatgtgcggtttgactgttgatgtcaaaactgtctttagagaaatcgagtctgaggcaaaactcagtatcagtttttctgattccaattatgatgagaaaattgtcgagattcaggaagtcttggacgacgagcagctcgaactgttggaagctgtcaaaacaatctatgacattggttctctggcaggagtattgaagggcgaaaaatatctttcggacgcacgcattacggactataacaagcataaagaagatctcgctcttctgaaaaagatcattcgcaaatatactgatcagaaaacgtataacgaccttttccgtggaactgagccggggtcctacagcgcatatgtcaattcgacgaattccggaaagaagcagcgtcggaacatgggcgggaatgccaaacgaaatcaggaagcgttctatgcatcattgaaaaaacttttgaacaagttgccgtctgaggacgatgatgtccaaaagattcttgccgatatcgacaaagagctttttttgccaaaacaactgacttttgcgaatggtgttatccccaatcaggtccatgctcgagagatgaaggccattctaaacaatgcggaacaatatcttccgtttttgacagagaaagatgagagcggtctaaccgtcagcgaacgcatcctgaaacttttctcgttccagattccctattatgttggccctgttactacaaagagcagtagagacggaggcaacggatgggtggtcagaaaagaaagtggacaggtccttccatggaatatcgaagacaagatcgatatggatgctacttccaagaagttcattgaaaatctgattcgagaatgtacttacattgcaggcgaaaaagttcttccgaaaggctcattgctttatgagcgatattgtgttctgaatgagatcaacaatatcaaaatcgacggtcgccctattgatgtcgaactgaaacagaaaatctttgaagataagtttatgtcggggaaaaaagtcactcgtaaacagttagtgacataccttcatggaaaaggtgtattggaagacgatgctcaactgacaggaatcgacaagacgatcaacaactctctctcttcctatgggaaattccttggcgtttttggcgacgaactaaagaaggattcctgccagataatggtagaggatatcatccgtgactgtaccatttatggtgattcgaaaaagcgcttaagagaaacgttacaaaagaaatatgtcgataataacaatttgagtgagtctcagttgaagcgcattcttgggttcaaattcaaggactggggacgcatgtctaaagagttcctggaaatgcagggtattaatcgagagactggtgaagtcatgtcgctcgttcaggcaatgtgggaaacgaatctcaacctgatggaacttatctacagcgaagattttacttttgcagaggcgcttcaagaaaaacaggcgaaggattacctgacactctcggaattcaaatttgaggatctggatgaatattatttctcggctccggtcaaacggatggtttggcagacgttgcttattatcaaggaactggaaaaagttctcggtgcaccgccgaagaaggtgtttatcgagatgacacgctccgatggtgtcaaaggagaccgcggtcgaaccatttcacggaaaaaacagtttgaagacctttacaagaaaatcaaagatgaatcccaggactgggcatccattattgataatgcggatgcctctgggaaactgcgctccaaaaaaatgtacctctatctgacacagatgggtaagtgtatgtatacagggaagcctatcgacttagatgatcttttcgatgacaacaaatatgatatcgaccatatctacccgagacattatgtaaaagacgataatcttggtaacaatttagttcttgtagaaaaaaaggccaatgccagcaaaggcgaccgttatcctctggatacggatattcgtggcaagatgcatggtacgtggaagttcttaaaggaaaagggcctgattactgaggaaaaataccgacgactgactggctctaaccccttttctgaagaacagcaggcagattttatcgctcgtcagttggtccagacaagtcaaggcacaaagggcgtggctgaccttctgaaacagcttcttccagatgcgaagatcgcttattccaaggcttccaatgtttcagatttcagaagagactacgaccttccgaaatcccgactaatcaacgacttccaccatgccaacgatgcttatttgaatatcgttgttggtaacgcttacctcgtgaaattcacgcagaacccactgaattatattcggagtggggacgttcagtataacctcggcagaatgtttgaaaaagatattgtgcgtaatggcgaagtggcctggcttgctgatgacggaaagggcaatcacggcaccattgtgacagtgaaaaaggtaatggctcgaaatacgccgatgatgacgcgtatggtccttaatggacatggagccattgcaaatgcgacactgtatcctgcaagtaaagctagtgcagataactatattcccttaaaaggaagtgactctaaaattgccgatgtgaccaagtatggaggcttcacaagtgtgtcaacttctcgtttcgtcctagttgaacacctggtgaagaaggaaagaataagaacgctagaggcgcttcctatcttagttgccaactcttgtaaaaccatggaagatattgagaactattgtgaagaagagttgggattgatagcacctaaagtaaagcttgatggtattaaaattcagtcactattaaagataaatggtttctatgtgcatctgtcaggcaagaccaataagcaacttgcacttaggaatgcagttaatctttgtcttgacgcaaagtggaaagagtatattcactatctcgaaaaagcatctaataatggtaattatggaaaccccatttgctctgatatgaacatagaattatattccatcttggctgagaaacatagcagctctatttttgcaaaaaggcctaaccctgttggtacaaaacttgttaaagaaaaagaaacgttctctaaactcgaattagtggatcaagtatctgtacttcttcagattcttcagttaagtgccataggaatcacccaagcagatttgcgtgccattggtggcgctggcatagccggaaaaatgctgattagtaaagatatttcaaaacaagaagaggctctattaataatgcagtctccaacggggctttacgaaagcacaattgatcttaaaacgatatga

SEQ ID NO: 196 - DNA, 4074 bp, unidentified
  misc_feature 1..4074: note = Synthetic sequence or unknown origin
  source 1..4074: mol_type = other DNA
atgcagggttattacttaggattagatatgggaactaattcagtaggctgggctgtaacagattatgaatacagactgttacgtttcaagggcaaagatatgtgggggatacgagaatttgatgaagcaaagccagcagtagaaagaaggagacatagaactaacagaagaagacagcagagaaaaatggttaggctgggtcttataaaatcatattttgcagatgaaattagtaaaatagatccattattctttaacaggctggataatagtaaatattttcttgaggacaaagatgaacaggtaagatgcaagaatgctatatttaatgatataaattatactgacaaggactactatgcacagtatccaacagtatttcatcttagaaaagaattaattgaaaataaagagccacatgatgtaagacttgtatatcttgcaatatctaatatgtttaaacacagaggcaatttcttaattagtggattgggaatagatagagatgatgagacaattggggaggcatatcttaaagttgcagatatgttgtcagaagaatttgatgttgaatttgataagaaaatagatttgtcattttttgagaaaacattaagcagcagagaatattcaagaacaaaaaagtcagaattaatttgtgatattttgcaagtgaaaaacagtgaaaagcagaaaaaagcatttgttaagtgtctatgtggattaaatgttaaaatatcagatataataggtgagaatgggatagaattatctgacgaagataagaagacagcatttagttttaatgataacgattatgatgtgaaaataatagaaatagaacaaaaaataggtgaaaataaaacaactgttatagctaagttaaaagaaattcatgataaagctttattatctgagataatgaaaggaaaaccatatctttcatatgccagagtggctgattatgaaaagcatgcatatgatttaaagatattaaagagggttataaagaagtatttttctaatcaggaatatgataacttattccgaagtgaggaaaatggaacatatagtgcatatgtcaattcatataactcagggaataagtcaagaagaaattataaagaaaggaaacaagaagatttatataagaatataaagtcattaatgaaatcattaggagataatgatgatattgatgttcaatatattaaagatgaaattgatagagaaaattttctgccaaagcagttgacttttaaaaatggtgttattcctaatcaggtacacgctaatgagttaaaggcgattcttaataatgcacaggaatatctcacattcttaaatgaaaaggatgaatcaggatatactgtgtcagaaagaatacaacaattattttcttttcagattccatattatgtaggaccggtttcatcagatagcaatggctgggtagtcagaaaagaagaaggaccggtgctgccttggaatataaaagaaaaaattgaccttaaaaagacttcagaagagtttataggaagaatggtcagaaattgcacatatatatcaggagaaagagttcttcctaaggcatctttgttgtatgaaaaatacagagtattaaatgaaattaataatttaagaatagatggagaaagaatatctgttgaactcaaacaggacatatttaatacgctttttctaaaaggaaagagagtcacaagaaagcagatatttaattatcttcatagcaggggtatggcgcaagaagatgcacagatatcaggtattgatgttactgttaataattcactgtctacatatggtaaatttcttccgatatttggtgaacatttaaaagaagatagttataaaaagatggcagagaatatcgtattctggtgtactgtgtatggagattctaagaaatttttgaaagaacagttggaagaaaaatacgctgacaaattggatgaagcacagataaaaagaatactgggaatgaagttcaacgattggggaaatctttcaaaagaattttttgaattatcaggatgtaacaaatcaactggtgaagttatgccgttgattaatgcattatgggaaaataatcttaatatgatagaattgctcaatagtgatgaatttacatataaagaatcattagcagaaaagcagaacgtggcaattaagtctttatctgaatatacaatagatgatttaaatgaagagtatttttccgctcctgttaaaagaatgatttggcagacattgatgataattaaagaaattgaaaaaataatgaaagcttcgccagatagagtattcattgaaatgacaagaaaagatggtgagaagggtgataaagggcggaaaaattcaagaaaagataagcttatagcattatacaaacagatacgaagtgaagattcagcatggaaaaaagagatgtcatcaagaatagaaaaatatgatgagaatggaagccttagaagtaaaaaactgtatctgtactttacacagaaaggtcttgatatgtatacaggaaagccgatagatatagatgatcttatgagtgctaattccaaatacgatattgaccatatttatccaagacattttgtgaaagatgataatattaacaacaatcttgtacttgcaagcaaaacagccaattcagagaagagtgatatatatccaataaaagatacaatatatcagaagatgaagagtacatggaaacttttaaaagatgagaatcttattacagaagagaagtatagaaggcttgtaggcagagaaccgtttacagatgaacaaaaagcaggatttattgcaagacagcttgtagagacaagtcaaggaactaaaggtgtggctgatttattaaatatgctgttgccagatagtaaaattgtgtactcaaaagctgataatgtatcggaattcagacataaatatgaaattccaaagagccgacttattaatgactatcaccatgctaatgatgcatatctcaatatagtggttggtaatgtgtattatactaaatttacgcagaatcctattaattttattaagaaagaatattcttcaggagacaggaagtttgaatataatctgagtaagatgtttgagtgggatgttgtaagaggtgataaggtagcgtgggtagcggagaaagacagaaaacatggcacaattgtgactgtcaagaaaatgataaataagaatacaccgatacttacgagaatgccagttgaaggacatggagggttagcagacgcaacattgtatagccataaaaaagcaaagtcagatacatatattcctctaaaggcaacagatgcaaagttgcaggatgtaactaaatatggcggattttcaagtgttgccacagcatatattttcttggtagaacatgaattaaagggcaaaaaggttagaacattggaaactgtaccattgtatatgaaggctgaattagaatcttcagttgaaagattagaacaatattgcagggatacattgggattaattaatccatctgtaaggattaagaagataaagcttcagtcattgattaaattaaatggatattatatgcagatttcggggaagacagataaacagttcggaatgagaaattgtgtacaattatgtttgaaaaaagaatggattgaatatgtgcataagttagaaaaatttcagagctatggtgtaattgatgatattataagtgagcagaataatatcaaattgtacgatgaactgtgcgaaaaacatagaaacggtatatataataaaaaacctaattatatgggtgacaaattgttaaatggaaaaaatgaatttgttaaattaaataaaaatgaacaaataaaggttttgatacagattataaaattaacagtggtaggattggtagagggagatttaacattaattaaagaatcatccaaaagtggaaccttaaaaataagtaaaaatataacaaatgcaaaagaatttgagcttatcaaccaatcaattacaggtctatatgaaaatagaattgacctgttacgagtatga

SEQ ID NO: 197 - DNA, 4077 bp, unidentified
  misc_feature 1..4077: note = Synthetic sequence or unknown origin
  source 1..4077: mol_type = other DNA
atgcaaaatggatattatttgggattagatatcggtacagattctgtaggctatgcagttactgatcaggaatacaacctgaaaaaatataaaggcgaacccatgtggggtgtgcatctgtttgaaggcggcaaggatgctgcagaacggagagcacatcgaacatatcgccgccggatcgatcgtgtgcagcaacgtgtggatctggtaggagagttgtttgcggaagaaattggcaaaatcgaccctgatttcttcatccgtcgcaaggaaagtgccttgtttgcagaggataccaagcatggtgtgaaaattttccggggcaatggcattacggataaagaataccatctgcggtatcctacgatccatcatctgatcctggatctgatgacaagcgatcagccccacgacattcgactggtgtacatggcctgtgcatggctcgtggcacatagggggcattttctttttgattttgcaccggatcaaacagaaaaactactggattttgacaaaacctttgaggagtttttggactacttttctcaggatgtagcccgtccctggagtgcggaaatcaaggccggagatttactgagtattctttctatgcagactggtgtcagcaaaaagaaggatgcctttaaacagaaaatttacggaggaaagaaagtcagcaaagaagcaacggaggaattcccctatagctgcgatgcaatcatgactcttttgtgcggtggtaaggttaagcctgaagcattgtttaccgatccctccatggcagatattgacagtgtgtcgcttctgatgggcgacgaggatttcgacaggatcgtgtcggaactgggtgacaacggagaacttctgtgcaaaatgcgtgctatgcagaactgtgcccgtttgattaccaccatgtccaataaacggccccaggatcctacctgtatttcctcttccaaaatagcaatttacgagcagcataaaaaagatctggaagccctgaaacgatttgtcaggaaatattgcaaaaatcaatacgcaaagattttccgactggtagaatcaggtaactatgtggcttactctaaaaatctaaaatccgtagccgacccgaaaaaattcaaaagtgccaataaagaagtattcagtgactttttgctgaagatcgtaaaaaatatcaaagtacgcaaagaagatgcggcaatgtacacagatatggtggagcggctggaggcacggacattcctgcccaagcaaaaggatggagataaccgtgtgatcccccagcaactatatcgtcaggaaatggcggcgatccttgcaaaggcagaaaaatatatccccatgctgagtaagccggatgcggacggtatgacagttacgcaaaaactgttatccatctttgatttccgcattccctactatgtaggccctctggtcagacacccccagggaactgcctggatcgagagaaagcaggggcgtattttgccttggaattttgaagaaatggtggatctggatgccagcgagcagggctttattaaaaagatgaccaatgactgcacttacttgccgggacaaaaggtgctgccggtcaattccttgctctatggcaaatttaccgtcctgaatgaactgaacaatctgaaagtcgatggcgtctctattccggtcaaagtcaagcaggaactgtatgaaagcttgtttatgcaaaagccgagagttacggtaaaacaaatccgtgaccatttgctgactcacggatacatgactgtcgggagtgagcttaccggaatcgataccacatttaaagccggactcaagtcctatcatgtattccggaacttactggagagtggtgtgctgaatgaagcagaggtggaatccatcatcgagcatgctgcttatacagaggataagtctcgtatgaggcactggctgaagcagaccttcccgcagatcccggagggggatgtggcgtatatcctgaagcaagatctaaagcagtttggcagattgtctcctatgctgctggctggcctttacggaagtgcaaaaaattcggacggagaggcatttaccatcatcgaagctctgtggaataccaacgaaaacctgatgcagcttctgtcggatcgttacaccttctctgagcagattcgggaatataccaaagaatactatgcagagcatcctgccagtctcaccagacgcctggaagatatgtacatttccgggccggttaaacgaccaattttccgaactctggatattatttccgatgtagtcaaggccacaggcaaagcaccggagaagatatttattgaaatggcccgtggtggcacggaggatcaaaagggaaaacgcaccaaatcccgtaaggatcagcttctggatctttataagctgatcaaaacagaggatgccaggatttttgaaaaagaactgaaaaacatgggcgagacagcggataaccgcttgcaggaacgtaaactgtttttgtactacctccaaatgggcaaatgcgcctataccggagagccgattgatgtgaacaagcttggtagcggtgactacaacctggatcacatttatccccaatcctacgtgaaggatgacagtctgttcaacaacctggtgcttgtaaaatctgaagccaacggaatcaaaggagattcctatccggttccggagcaattccgaaatactatgtaccaaacctggcagtattggaaagacaagggtttgatgacggatgaaaaattttcccgccttaccagaaaagtgcccttctctgaccatgaaaagcaaggctttatcaaccgtcagttggtggagacccgtcagtctacaaaagcgattgcaacactcctgaaggagcggtttccggatacagctattgtctatgttaaagccggtatggtttcggagttccgtcaggaatttgatttacccaaatcccgtactgtcaacgatctgcatcatgcaaaggatgcttatctgaatgttgtagtgggtaatgtctatcatgaacgattctcggatcggtggttccggatcgacgaacactataatgtgcagttaaagaaaatttttgacagagcgcaaagacatggcagcacgatctattggaacggtgaagcagatattgcaaaagtaaagaaaactgccgggaaaaatgccatccacatgacccggtacgcattcttgcgaaaaggcggtctctttgatcagcaacccgtgaggaaagccaaaggcttggtatcgctgaagcatggcatggcaacagaaaaatacggcggctacaacaaaccgtctgtgtgcggctatgttctggcaaagtatacagccgaggggaaaacggaaattatgtttgttcccgtagacctccgcatgaaggatcaggcaacgcagaatatcgaggcactggctacctatacgatccatgagattggaaagattaccaatcaggaaccggaaaaagtggaattgctgctggacggcagaatgctgaaaatcaacacggcaatcatggcggacggagtgcgaatggcgttggcaggaaaagattcaggtggtgcaaacgttttgctatctccggtgatggcattgaccctttctaaaaagtgggaggcatatataaaggctttggagtcctttgataaaaaacgtacagtaaaccgcaacattgtgctgaatcaagaccatgacgggatctctgcaccggataatctggaactttataggctgttgatacagaaaatgaaagcatggccgttctgcaactatcccggaaatcaggtggaggtcattgagacaggagaaaaaatatttacaaaggctgcgattgcagaccaagttacctgtctgttgaatatcctgcagttaatgggtcccggcagtggaggcatagatctttctgtatgtggcggcaagaaatctgtaggatctaagcgtagaagtgcaaagctttctaactggaaaaaatattacaaggaagttaggatcgtggatgtttctgcgtctggcttgtacgaaaaaattagtgagaatttgttggaaatgctatga

SEQ ID NO: 198 - DNA, 4083 bp, unidentified
  misc_feature 1..4083: note = Synthetic sequence or unknown origin
  source 1..4083: mol_type = other DNA
atgggagcatactatctcgggctggatattggtacggattccgtgggctatgcggtgacggatccggcgtattccctgcgcaaattcaagggagagcccatgtggggaacccatctgtttgaaggcgggcaggaatctgctgaccggcggctccaccggaccaaccgccgccggatcgaccggagacagcagcgtgtcgccctggtcaatgagctgtttgcggaggagatccggaggatcgaccccaatttctttgtccgcagaaaggaaagcgccctgttcccggaggatacggcccacggggtgaggctgtttgacggcggcgggatcactgaccgggagtatcaccggagatatcccaccattcaccatcttattctggagctgatgaccagtaatgaaccccatgatgtgcggctggtgtatctggcctgtgcctggctggtggcccacaggggacatttcctctttgatttcggcgcagatcagacggatcgactgctgaatttcggggaggtctatgggtcgttccgagactatttgcaggagcagggctattcgatgccctggccggatgctgtctccgcggatacggtgctggagatcctgcaaatggatgcgggtgtcggaaaaaagaaggaagccttcaagatccgggtattcggggggaagaagcctgcaaaggaaggtacggaggacttcccctacagcccggaggggatcgtaggcctgctgtccggcggaaaggtaaagccgagggatctttttgacaaggaagcctatgagcagatggaatcggtgtctctggacatgggtgatgaggagtttgatcggatcgtgtccgagctgggcgatgacggggagctgctccggcagctgcgcagcctgcacagctgtgccaagctgatcgccaccatgtccaattgccgggagggggatcctgtttgtatctcctcctcgaaggtcgccatctatgagcggcaccagaaggatctggagctgctgaaacggctggtgcggaattactgcccgaagcagtacaatgagatcttccgcagagcggtggcggacaactatgtggcctattccgggaatgtccaatcctgttcggagaatgataagaaaaaggtcaagcggatcaataaggtgggattcagtgagtatctgaaaaagaagctcaagggcttgaaggtggaaccggcggacaaggcggaatatgacagcatgatgaatcggctggagcattacagcttcctgcccaggcagcgggataccgataaccgggtgatcccccagcagctgtaccggcaggagctggcggcaattctggagcgggcagaggggtatctgcccatgcttcgggagaagaatgccgacggattgtcggtatcggaaaagctgctgtccatctttgattttcgtatcccctattatgttgggccgctggtacggcaccccaacagcacggcctggatcgagcggaagcagggaaaaattctgccctggaactttgagcagatggtggatctggatgccagtgagcaaaaattcatcgataaaatgctgaataagtgtacatacctgcccggagaggatgtgatgcccgtcaattctctgctgtacgaacggtttacggtgctgaatgcgctgaacaatctgaaggtcaacggcagggagatccccgtggcggtgaagcaggagctgtatacccagctgttccaggagctgcccagggttccggtgaaacggatccgggaatacttgcttcagcatgggtatatggcaaaggacgaagaactgacgggcctggacagcaccttcaaatccggcctgcgttcccatcacatcttcaagcggctgctgggcagcggggctttgacggaagcgcaggtggaggagatcatcctccatagagcctataccgaggacaagtcccgaatgggccgatggctgcgaagcacctacccccagctgaccgacggggatgtacagtacatcctgaagcagaagctgaaggaattcggaagactctcccgaaagctgctgacggggctttacggcacggaacgggactcctatggcgatgcgtattccatcatggaaatgctgtggaatagcaactgcaatctgatgcagctgctgtcggagaaatatacctatgccgagcagatcagcgagtattgtaaggaatactattccgagcatccccgaaggctgacggatcggctttccgagatgtatgtgtccaacgccgccaagcggcccattttccgggccctggacattgtctccgatgtggtcaaggccaccggcgaagcgcccgcaaagattttcgtggagatggcaaggggcggcaccccggatcagaaggggaagcgtacggattccagaaagaaacagcttctggattgctacaaaaaagtcaaggatgaagatgtatcacagttcgtaaaagccttggagaacatgggagcagaggtggacgaccggctccaggatcggaagctgtacctgtactacttgcagctgggcaggtgcgcctatacgggccgtcccatcgagctgtcccggctggcagacggaagctacaatctggagcatatctatccccagtccctggtcaaggatgacagtctgctgaacaatctggtgctggtggaatcggaggtcaatggtcaaaagagcgatgcttacccggtggatggagatattcgcaaaaagatgggggctttctggtcgatgctgaagcagaacggcctgatgacggaggagaagtaccgccgcctgacccggccccatccatttaccgcagatgagaagctgggcttcatcaaccggcagctggtggagacgagacagtccaccaaggtcattgcggctttgctgaaggagcggttcccgaaaacggaaatcgtctatgtgaaggcgggactggtgtcagaattccggcaggagttcggactgctcaagtgccgctcggtcaacgacctgcaccacgccaaggatgcttacttaaatatcgtggtgggcaatgtgtaccacgagcggttcaccagcaaatggttccgtcttgaggaacactacaatgtgcaggtgaagaagctctttgccaagccccacagccacggcggcgagtgctactggaacggggaagcggatatcgcccgggtcaggaagaatatggcgaagaatgcggtgcatttgaccaggtatgcgtttatccgcaagggcggcctgttcgatcagcagccggtgaaggcggcagagggcctggtggagcttaagaagggcctgcttaccgagaaatacggcggctataacaaggccacggcatcgtgcttcatgctggttcggtttgaactgaagggcaaacgggaagtgatgctggttcctgtggagctgctggtaaaggatcgggttttggatgaccgcacgtttgcacagcagtatgctgcgcagaccgtcgaaaagatcatcggcaagaaaccggagaacctggagctgctgctgaacggcagaccgctgaaaatcaatacggtgttcagctttgacggaacgaagatggttctggccagtaaagataatggcggtaaaaatgtgatgctatcacctctggttgccttgatgcttgcgccggaatgggagcaatatgccaaacgcttggaatccttccaaaacaagcaaaaaaacaacaaaaatttacagccgaatgaggtacgcgacggaataaccggggaaaagaacgcaaccctgtacagaatactggcgaaaaaaatgggagaatggcccttcaagcagtttccgggaaatcaacaggagaatttggagcgcggtggagaagttttcgagtccaaggaaattaccgagcaaatcacctgcctgatgaacatccttacattgatgggcccgggtagtgccggtgtcgatctccgaggctgcggaggaactggacaagcgggaaaaaagtccgccaatgccaagatttccaattggaagagccgctattccgatgtccgcatcatcgacgaatccgcctccggcctgttcagcaaaaccagcggcaacctcctcgacctgctatga

SEQ ID NO: 199 - DNA, 4086 bp, unidentified
  misc_feature 1..4086: note = Synthetic sequence or unknown origin
  source 1..4086: mol_type = other DNA
atggctaaaaaactattccctaattattatcttggactggattgcggcacaggttccattggttgggccgtaaccgaccttaattataatattctcagattcaatgggaaagccatgtggggaatacgtcttttcgagactgcggattcagctactgaccgacgtgtcgtacggtgcaatcggcgccgaaatcaacgacgaacacaaagaatcgactggctccaagaacttttcgcagcagaaatagcaaaaattgacccaaccttctttttgagactgaatgaaagtcgttatcatatcgaagataaaaccgaacgacaacccaatgctttatttaatgatttcaactacaaagacaaggattttttcaaacgttaccccacgatctttcatttaagaaaagaattgattgatggaacagcctcctacgacatccggcatgtatatctcgccatccaccatattctcaagaatcgtggccatttcctttttcctggagaggacatggcaagtgtaaagaatgtaactccgttgtttgaacaggtgaaaagactccttgtcgatgcttttgacgttgaattcaattatgcggatatcgtagaaatagaaactgcattacgacagagaaaagccgcttcaagaaaagaatctttacaacgtcttcttgctgcttcagacgatgttctactaaaagcaatgattgatacaatgacaggttacaaaatttcgttgagcaaaatgtttcaagatgaaaacttggcaaatgcagaaattacttccatcaactttagtgaaggtacgtttgaagacaacacagagctgttacaaactatactaaattccgatcaattcgaattgcttacagtattgaaaggaatttacgactggtcccttttagctaatataatggaaggattccagtacatatcttatgcaaaagttaaccggtttgttgcaaacaaagaagaactatgcaagttgaaacggctaataaaaacatacgcaccagataaatacgactcttttttctatgatactgataaaccatatctgtcagcatatgttggttcatataaatcaaatggtaaaaagactgctgtaaatcgttgttcagcggaagacttcaataaagctgttgtaaaaatattagaaggaatgccggatacggtaaaagaggagcctgactacacgctacttttgggaaaagccaaagatttgacattgctacctttgcttatttcctccaacaacagtgtactcccacaccagatccatcttattgaattgaaggcaattttgaaacaatctgagcggcatcatccattcctagcccaaaaagacgcaaaaggattgagcgtatcggaaaaaatcatcaatattcttagctatcgcatcccttattatgtcggacccattactgatttccatgatgataaaataaatcccaataaatttgcctggatgacaagaaaaaaaacaggaagaatttatccatggaattttgatgaaaaaattgatattgaaaaatcagctgaaaaattcatttcacgtatgacaaacaaatgtacgtatctccaagacaaagatgtactacccaaaaactcactactttattccaaattcactgttttaaatgaactaaataatctcagaatcaatgaaaccccaatttcaatagagcaaaaacaggctatctttgatgatttattcaaaacccacagaaaagtgacaaataaaaaactgcatgactatcttatcacacaaggttggtacaacaaaaaccaagaactaattattacaggcattgattccaattttgccaattctcttggttcctatattgacttcaaagattttatagaaactaaggttttgaccagaactgacgttgaaaacatcattcgttggatcaccttatttggtgcggatagaaaactattgaaaaagcgtgtcaaagcaaccatgggacagaagctgtctgatcagcaaattgatactatcatcaacaagttccattataaagattggggacggttatccaaagaatttcttacagacatatttcatatggaaaaatcgacaggagaagttaaaagcatcataacaatgatgtgggagaccaataacaatctcatggaactcatgagtccttcttttgattacgcagggcagatttccaataatgcgcctatagaaaagctcgattattctgttgtggaacaattaagtacgtccccttccgtaaagcgacaaatttggcagacgctattaattgtcaaagaaatccagaaaataatgggacatgtaccaaagaaggttttctttgaattcgccagaggtgaagaaaaaaagaaacgaacggtttcgagaaaaaacaagctcaaagaactctacagcaatataaaatctccagatacagaggcaaaagaattgttacagtttctcgatgccacaaccgattcgcagttgcgaagtgacaaactctatctttactacacgcagattggaaaatgcatgtattcaggggacagaattgatatcaccgatttgtacaatacaaatatctatgatatagaccacatctatccccaatccaaaacaaaagatgacagtctggataatcgtgttttagttaaaaaggaaatcaacggtcataaatcaaatgtctatccaattgaagattcaatcaggataaaacagcatgcattttggaagactttatacgacaagaactatatttcaaaggaaaaatttgaaagacttactaggaatcatcctctgacggatgaggaattagcgaatttcatcagccgacaacttgtagaaactcgacaaagtaccaaaatagcggcaaacgtattatctcgcttctttggtgatagtaccaagatagtctattcgaaggcacggaatgtttcggacttccgcaacgagtttgatttgacaaaatgtcggacagtaaatgacttccatcatgcaaaagatgcttttctcaacattgtcgttggcaatgtatatgatacgaaattcacagggaatcctttgaatttcatcaaatccaaaactttgtataatctgacaacgaaaaaactatttatggaccgggtagaaaaagcttgggaacctcaaggagaaaatagtaccttgcaattggtaaaacatacgttacaaaaaaacaacatactgttcaccagacaacaaatagaacggggtggaagtttttttgacgcacaagttgtaaaaggaggctcctaccaaggtctcctgccaacaaaaatggcagacaaaaaactccagcgagcgttgcaaaacacacagaaaaaccgcaaagagattatcactgaatggacagataagtatggtggttataacaagttgagcgttgcgtactttattcttgtcaagcataagaagggtaaaaaagaggttgtatcctttgagccaatgctaaatctctacaaagctttttgtaaaaccgaagctagtttggaaaattattgtaccaaagagctggaacttgtggagccacatattattttgaagaaagtattaatcaatactctcttcaagattgatggtttcccgatgcaccttgctggtaaagcaggtgagaaggtaaaagttcgacctgctgtacaactctgtttatcaaaagaagatgaagcgtatataaaaagattaagcaactacaatgatagaaggttgaaacaaaaagtaaaagaactacaaattgagcctcaatacgatcatatcagttgtgaacaaaatatgatactttaccaacacttggtgcaaaaaagcaatgaacccatctatatcaaacgacctgctgggcaatccaaacttctggaaatggctaccccactatttgaacaactttcaatagaacaacaaagcttattgctgcttcaaattgttaaatatttttcatgtaccggcgataccgtagatttgaaattgcttggagggtcagcccaagcaggattcacgttaattcctaaaactttaccgaacacaaaaatcgctttatttatcaatcaaagtcctacagggttattcgaacaggaggtacctatttcattatga

SEQ ID NO: 200 - DNA, 4092 bp, unidentified
  misc_feature 1..4092: note = Synthetic sequence or unknown origin
  source 1..4092: mol_type = other DNA
atgagaaaaaataaatatggggattattatttaggtttagacatgggcaccagttctgttggctgggctgttactgatactaattataatattttgaaatttaatgctaaagctttatggggaatacgtttatttgaagaagcaaagtcggctgcaggtacaagattgtatcgttcgcaaagacgccgtatagatagggttagctggcgtatttctatattacaggaactcttttcggaagtaattgctaaagttgatccaggcttttttatgcgtttgaaagaaagtagattaaggcttgaagataagaaagttcctttaaaatataatttgtttattgataaaaattacactgatattgatttttataaacaatatcctactatgtaccatcttcgttatgctttggctactagagaagaatgttttgatgtacgtttattatatttggctattcagcatattgccaaacacagagggcattttctatttgcaggcttagatgctagtccaattaccgattttagaaatatttatgataagcttgaggagtatatcaaagaagagttggagctcgctgactggagctgtcaaaatatagataaaatggaagaagtgcttagtaacagcaatctaaatgttacggcaaaaaagaaagagttagaaaaattattacctagagataataaaaagtgtaaagcattgataagcttccttagcggtggtaaggctaagatgagtgagctttttgatgacgaaaatttaaaactgtgtgaaaaagatagttttggctttcgcgatgatgattttgaaacaatcatgccgataattgaagcggatttaggtgatagaattgaaggtatatttttgctcaaatctatttatgattggagtattttagcgaaaatattaggtattaatggacaaatacaaaatcaaaagtataaatttatttctagcagcaaggtagatgtttataatcagcatagggaagatttggtgactttgaagaaaattcttaaaggatctgtgcagtataataaaatttttaggatgaaaaaagagggaagctatgcatattatatttctggaaagcaaagtcaggaggatttttgcaagactttgcaaaaaatagttactaatgatcaattgttaaagcggaagtctgagcaagtgacaagctttgagcaggttaaggatgcagaagatggattattataccgtattgctaatggtttagcttttcctaagcaggttactaaagagaatggaataattcctatacaagtaaatttagttgagttggatgctattttgcaaaatgcagaaaaatatttgcctttcttatcagaagtagatgctgatggacttaccatttctgataaaattaaagccattgtgaaatttagaataccgtattatgtaggcccattagctggaagcaaatattctaaggaaaagggaagatgctgggttgttagaaagaatgaaaaaatttatccttggaattttgataaagtagtagatttagaggcctgtgccgaaaaatttattatcaatatgactgctaaatgcacttatttacttggtgaagacgttctgcctaaaaattcattgttatattctgagtttatgatgcgcaatgaattaaatagcttgaccatagatggcgagcgagtttcttctgaattattgaataaaatttataatcactttacgacaaaaaataaaattactaagaaaaacataaaagaatatttgaaaacagaaaatatttattgcgaggatattggcggaatagatgatgttgttaaatcgaatttaaaatcatttaaggattttagtagaatttttggacaagattatgttgtgtgtcatacgaaacaaattgaagatatcattcgttggataacactgttttgtgacgaaaaggatctattgcgtaaaaaaataataagtgaatatcctgaaatttctgctgaaaaattagaagaaataaaaaagttaaaatacaaggattggggaagattatcagcagcgttacttaatggagaaaaaatagcctatattgatgacagtaccggtgaagttattactattatcagcgcattgcgtcacaccaataaaaattttatggagctgttaagcaatagttgcgaatataagtttatagataaaattcagaagtttaataaatcagatgtaaatacttctgaaaatataacttataaggatgttgaaaaattatatgtttcacctgcagtaaagcgcagtatttggcaaacgttgtccattattaaagaattacagcttattttaggtcatgctcctaaaaaagtatttttggaaatggcaagagaaaagcaggagagccaaagaactattagccgtctgaatagactgaaagagctttataaagaatgcaaagatgaagaaatatttttgagcagctcattggaagaaaaaacagatgaggatttgcgcagggataaattatatttgtactatactcagttaggtaggtgtatgtatactggcgaaagaatagaaattagtgatctttttaatgataatttatacgatattgatcatatctatccaagatcaaaaacaaaggacgacagtatagacaatcgcgtattggttcgtaaaaatatgaacagcaaaaaaagcgataaatatcccttaaatgagaatattcgtagcaaaatgcgcgcattttggaaagacctttatgaaagaggatatatcagtcaaaagaagtatgagcgcttgattagagttaatcctttaactgatgatgagctggcaggctttattaataggcaaatagtagaaactaggcagtcgactaaagctgtagctgagcttttgcagtcttattttggcagcgataatgttatttttagtaaggcagggaatgtttcagattttagacagaagtatggttttataaaatctcgtgatgtgaatgatttgcaccatgctaaggacgcatatttgaatattgttgttggtaatgcatattatactaaatttactaaaagtcctataaattatattaaaaacaatcatgattttaaatatagccttaaccctgataaattttataactttccaattgaaagagctggcgtgattgcttgggttcccggagaagatggtactattgctatagttaaaaaaatgatgagcaaaaacaatattctttttacgcgtatggcggtgcaggggaaaggtcaaatttttgaccaaaatcctgttgcaaaagcaaaagataagtggcctttaaaacaaggattgccaactgaagtttatggcggatataattctttaacaacatcttattttgcgcttgtggaatctttgggtaaaaagggaaagaaacagcgttctttagaagcagtgcctataatatttgctgataagcaaaaaaatgttattgaaaaatatttgtctacaaacagtaatttagtaaatcctaaaattatactgcctaaaatcaggaagttttctttgctttatgttaatggctaccctatgcatattgcttcgtgtacaggcaaacaaattactttctattctgcaagacagttgattttacctgatgatgaagttacctatgtaaaatctatttttaattgcgaagaaaaaattcaatataatgaaagtatcatttatgatttgcaaaaagatgaaacgtctaaacagattgcaaaaaagagattgcagtattatgaagatagatttggcatatcaagagtaagaaatttaaaattatatcaattgttagttgccaaatgcgctgataaaagtttctataacagacctgcttctcagtacgaaaatttaaaaaataatgaagatgtatttgcaagtttaaagctttttgaacagattaaagttttggagcaaatttttaaactgtttaaatgcggcagtgcttctgctaatttaaaattattgggacttggagcttattgcggtattcctaaaattggtatgaccctcaaggacaaaacacaaataattttagttaatcaatctgtaacaggtgtttttgaacaagcaatagacttgttaagcgtatga

SEQ ID NO: 201 - DNA, 4092 bp, unidentified
  misc_feature 1..4092: note = Synthetic sequence or unknown origin
  source 1..4092: mol_type = other DNA
atggaaaacacagagtattatttgggattggatatgggaacttcatctgtaggctgggctgtgacggatacacattaccggcttcttcgtgcgaagggaaaagatatgtggggcatacgtgaatttgatagagctgatacatcagtagatcgcagaacacatcgtatcagccgcagaagacggcagagagagctggcacgtataggtatgctaaaggattatttccatgatgccatttcaaatgtagatccctatttctatcagcgccttgataatagcaagtattatgtagaagataaggaagaaaatgtacgcaataaaaatggaatctttcatgatgagaattattcagatgtagattattataacgaatatccaacgatttttcatctgaggaaggaattaattgaaaatagtcagccgcatgatgtcagactggtgtatcttgcattgctgaatatgtttaaacacaggggacatttcttaaatgcaggtttaagtcagggtacggacacgcagtcaatggaatctgcgtatcagcagctcctgatgctgctggagacgacatttattgataatcaggatttggttgtgtttccggacgcaccagattatagaacgatagaagatattttaagcaatcgggattattccagaacgagaaaatctgaagaactggcagcgttcttcaaaattgaaaaaaaggataagacggcatttgcctatgtaaaggcaatctgtggactcaaggtagatgcaaaacttctctttccgaatatagaagatgaggaaaagaaaattgatatttgtttttctgagtatggattcgaggataagatacaggaaatatcagatgcggttggagaagaaaattatcagattgtagaagcgttgaaagcgatctatgatatcggttcgctcgccggcattatgaaagggtattcgtatctgtcagaggcgcgcgttgcagagtatgaaaaacataagtctgatttggcgcgtttaaagtctgttataagaaagtataagacaccggaggaatatgacaaaatgtttcggcagaaggagccgggaagttacagcgcatatgttaattcggtcaatgcagatgggcagcaggtctttggcagaaggaatatgaaagaacgcaaaagagaagatttatacaagactatcaggcagcttttaaaagatgttccgcaaaatgaggacgttacatatattctgaatgaaatagaaaaagaaaattttctgccaaagcaattgacagcttccaatggtattattccaaatcaggtacatacgagagaaatggcaaagatacttcagaatgcagaaaattatctgccgtttttgaacgagaaggacgaatctggactgacggtctcacagcgtattttaaaattgttcacgtttcagattccttattatgtgggtccggtgtcgccaaagagtgaacagaatggaggaaatggctgggttgtcagaaaagctgacggtaaggtgcttccgtggaatatcaatgagaaaattgatttaaaggctacttcggaaagatttattgaaagattaatcaggaattgcacatacatcagtgatgaaaaagttcttccaaaggcgtctttggagtatgaagcattttgtgttctcaatgaaattaacaatttaaaaatagatggtgaaaaaatttctgttgaattaaaacaggagatatatcgcgaattgttccagcgcgggaaaaaggttacaaagaagcagttagtaaattttctgagttgcaaggggattcttaaagaagaagctcagttgtccggtattgacaatgaaattaacaattccctttctacctatggaaaattcaaagcgatttttggtgagaaactggaggaagatgagtgcaggcacatggtagaggacattgtgcgctggtgcaccatatatggcgattctaagtcgtttctaaaggaacagttggaagaacggtatgcagataagatttcaccggagaatatgaaacgtattttcgggtttaagtttaaggactggggacgtctttcaaaagagttccttgaactgtctgcctgcgataagtccactggcgagaaggtttcgttgatccgcacaatgtgggatacgaattataatctgatggaattattacatagtgaaaactatacatttgacgaagctctcaaagaaaagcagaaaaagggagtccgcctgctgcaggaaatggaaccggaagatttggatgaactgtatttttcagcaccggtaaaacgaatggtatggcagacgattctgattatcagggagattgaaaaagttttaggaagttctccgaaacgtctctttattgaaatgacacgttcagatgaagaaaagggcgataaaggcagaaaagattcccgaaaaaaacaactgcttgatttgtataaaaatataaaagatgagtcgagagactggaaagctgagattgaagcggctgatcaaaagggatggctgcggagtaagaaggtttatctttattatacacagatggggcgctgtatgtattccggacagccgattgattttgaagcattgatgaatgacaatatctatgatattgaccatatttatccgagacactttgtgaaggatgataatatcaataacaatctagtattggtggacaagcggctgaatgcacataaaagtgatacatacccgttggaggcatcaattcgtttttcgacagcaaatattgcattgtggaaaagacttttggacgtgggacttattctgcctgaaaaataccgccgattgacaggcagagaggcttttacggacgaacaaaaggctggttttattgcaagacaattggtagaaacaagtcagggaacaaaaggcgtatcggatatattaaaagaaatgctgccggaaacggagattgtatattccaaagcctccaatgtatctgaattccgtcatcagagaggtcttcagaaaagcagactggtgaatgattttcaccatgctcatgacgcatacttaaatattgtggttggtaatgtttattatgtaaaatttaccaaaaatccaataaattttattcgaaacgaatatgcaagagacgcaaaaaccttcaattacaatctgagcaaaatgtttgatcgggatgttgcgcgtggtgaggagattgcatggaaagcacagacggaagaaggtgccggaacaatcgtcacagtgaaaaagatgctggcaaagaatacaccgctgttgacgagatttagctttgaaggacatggcgctattgccaatgaaacactatatggggcatctaaagcaaaaaaagatggatatattccattgaaatcttctgatcaaagaatgttggatgtaacaaagtatggtggatttaccagcgcttcgacagcatacttctttcttgttgagcatgaggtaaaagggaaaaacgtacggacactggaaacggttcctgtatatgaaaaagataagattgcacaggaaccggaagaattgcagagatattgtgagcagacgttggggttgattcatccgtctgttcgtataagcagaattaaaattcaatcattaatgagaatcaatggatataatgtgcatatatcaggaagaactggaaatagaattacagttagaaatgcagtgagtatgtgtcttggacagaattggatcgattatattcatctgttggaaaaatatcgtgagaaacaggacatggatgaaaagataacggcagcagaaaatataagattatatgacatactgaccgaaaagcatacgaaagcaatttatcagaaacgtttgaatccgataggaaagaaattaattgatgcgagagaaaaatttgaacagctgacagtagaaaagcagagtcttgttcttttacagattctgcaggcaacacagattgggattgcagtggcggatttaacattgattggggaaacagcaaatagcggagtcatgttatttggaaaaaatattacagctttttcggagtgcaaactgatcaaccagtcggtaacaggtctttttgagagcagtgtggatctgctcactgtatga

SEQ ID NO: 202 - DNA, 4104 bp, unidentified
  misc_feature 1..4104: note = Synthetic sequence or unknown origin
  source 1..4104: mol_type = other DNA
atggaaactgaaaagtattatgttggacttgatatgggaacgaattctgttggttgggcggtgacggaccgggagtatagaattgtcagagtgaaaggaaaagatttctgggggattcgtgagtttgaggaagcaaagactgcggttgatagaaggtctaaaagggttagcagacggcgcagacaaagggcacaggtgagatcagggcttgtcagaagttactttgaacctgcagttttagcggaagatccactgttttatataagaatggataatagtaagttttttgaagaagataaagatcaggtgatagggaaaaatgcgatatttgatgatgaggattacaaggatgctgattactattccgagtatcccacaatttatcatttaaggaaagcattgcttgaggatactgttccccatgattccagatatgccagaaaagtatatctggcgattcataatatgtttaaacaccggggacactttctggaatccgggttgagcgaaaaagagagtatgaattctatgacgattctttattcagaatttgttgagcaggtggatttggttttggatttgagttttccatcaggtgttgcggaagaaataaaagagattttgtcggatagcggcttatcacgaagtgccaaatcagataagattgcggaagtctgtcattttgataaaggtaacaaaaaagaattattgctgatcagggcaatctgtggattgaagttagatgccaagaaagtatttgatggtttggatgatattgaggaaaaaattgaaattgaattcagttcggcttcttacgaagaaaaagtagaagaactggcttctgtgcttggcgatgaaaattttgaattgattgagatcatgaaggatatttatgatacgggtatgctagcgaagatcctgcatgattatcaatatctgtcagagtccagagtagctttatatgagaagcaccatgcagatctgaaacttttaaaagaagtatataaagagcatttttcagaagatatttatgacaaaatgtttagaggcggaaaagaaggggcggaagacgggaaatatagtgcctatgtgaattcttataacaccgagaaactgaatgaaaccggaaaaccgatgagacgaacagcagacagtcgtaccaaagaggcattatacacatccataaaaaaggacttgaaagatctgaaagacgacagagcagaatatatattgaaacaaatagatacggataattttctgcccaagcagcttacaccgggaaatggagtgatccccaatcaggttcaccgaagagaaatgaaagcaattttgaaacaggcagagaagtatctgcctactttgcgtgaaaaagatgattcaggactgacaacgagtgagcgtatattaaagttgttttctttccagattccttattttatcggaccaaccacagaaaaaagtaaagagtgtggtggaaacggatgggtagtgcgtaaagaggaagggcagatactgccgtggaatatcgaagacaagattgattatcagaagacgtctgaagaatttataaaacgtttgatcaggaattgtacctatcttagcaatgaaaaagtgctgccgaaggcatctttgatctatgagagattttgcgttttaaatgaaattaacaatatgaagattgacggtgaaccgatttctgttgaactgaagcaggaaatttatacggagctgttttgcaaaggaaagaaggttaccagaaagcagattgaaaatttcctggcgaataggggatgtttatcagaatcagcacagcttaccggaattgacaccgcaattaataacagtctgtcatcatatggaaagttcaggggcgtgtttggagaaatgcttgatacggatgagtatcagaaaatagcagagaatattatttatcttgcaacggtttatggtgattcgaaaaaaatgttgcgagaatgcttacagaaagagtatcaggatatactggatgaaggtcagattaaaagaattttaggattcaagtttaaagattggggaaaaatgtctcgtgaatttttggaattgcagggatgcgatactactacaggagaagtgaaatctttgatcagcgcaatgtgggataccaacgagaacctgatggagcttttacatagtgaacagtttacttttggcaaagagttgcaggcaaagcagataaaacagttggaatctttaaaagattttcaggctaatgatttagatgagttttacttttcggcaccggtaaaacgtatggtttggcaaacgatccttcttattaaagagattataaaggtcatgggtaatccgccggaaaaagtgtttattgaaatgacacgtagtgaagaagaaaagaagggagaccagggaagaaaagcttcaagaggaaagcagttgctggaactttacaagacagtaaagaatgaagaacgtgactggaaaaaggaaattgaatcggcagacgaaagcggtaaacttcgcagtaaaaagctatacttgtactacttacagatgggaagatgtatgtatacgggagagccgatagaattggatgagctgttttcaacgaagtatgatattgatcatatttatccaagacattatgtaaaggacgataatctttctaacaaccttgttctggtcaagaaagaaagcaatgcgtataagagtgacaattatccattagttgaaatgaaacccgaagtatatcagttatggaaattgttacatgcaaagaagctgatcagtgatgagaaatatcgcagattgacaggtaaaaatccatttacagatgagcaaaaggcagattttattgcaagacaattggtagagacaagtcagggaacaaaaggtgtggcagatctgttaaagcagcttttaccggagaaaaccacagttgtatatgcaaaagcaagaaatgtttcggattttaggcgtgataacggatttttcaagagtagaattgtgaatgattttcatcatgcaaaggatgcgtatttaaatatagttgtaggaaatgtttatttcacaaagttcacacagaatccattgaattttatcaaacgtgagttagcgatggatcagaaaaaaaatcattacaatctgggaagaatgtttgattggaatgtagaaagaggtgggttggttgcatgggtagcaaggaacgaagaaaaaggtattgagggatcgatcgcgactgttcagaagatgatggcaaaaaatacgccaatgatgacaaggttgtcatttgaaggacatggcgggattacaaaggaaacggtacatccatccagaaaagcgaaaaaaggtatctatttcccgatgaagacatcagatgaaagattggcaaatgtggaaaggtatggtggatattcggatattgcaacagcatatttctttgtggtagagcacactatgaaaaaggaaagagttagaaccattgaatctgttccggtttatttaagtaaagcagttgaaaataatccggataaactggaagaatattgtgtcaatgttctggaattgaaggagccgagtgttagagtcagaaaaatcagaatccagtctctgatgagatataacggttatgagatgtatatttcgggaaaaatgaatggcggcaagtattatacattatggaatgctacaaatttatgtctttgtcaagaaatggttaattatgtgaagtcactcgaaaagtatggcgatgaaaaaattgtaagtgataatatttgcagagagaaaaatattgaattatataatgaattaagagaaaaacatgatacgggagtatatagtagacggccggttccgataagtaaaatactgaatgatggcttagagaagtttgaaaaactggagattgaaaatcagtgcaacattttgttagggattttaaaattatcttatattggaacaccaaatgctgatttggaagatataggaggaaagaaaaattcggggaaaatgtatattagcaaaatgatcacagaaaagaatgcaccagttatagtgaatcaatctgttacaggactctttgaaaacactataaacttaatgacggtatga

SEQ ID NO: 203 - DNA, 4110 bp, unidentified
  misc_feature 1..4110: note = Synthetic sequence or unknown origin
  source 1..4110: mol_type = other DNA
atggagcaaaacaccaaaaagctctttattgggcttgatgtcggcaccgattcagttggctgggctgccaccgatgagtatttcaatttgtatcgattaaaagggaaaacggcttggggcgctaggcttttcctcgacgctgcaaacgcgaaggatagaagacaacatcgcgtttccgggcgtcgccttgcaagaagaaaagaaaggattcgccttctaaacgcattgttcgaccctttgctgaagaaagtcgatccaacgttcttgcttcggttggagagctcgaccctgcaaaacgatgacccgaataaagatcaacgcgccgttagcgatgcgttgcttttcggaaacaaaaaacacgaaaaagcctattacgcagcctttcctacgatttggcatcttaggaaagctttaattgaaaatgatgacaaagcgttttctgacattcgatatctgtatttggcaatccatcacattatcaagtacagagggaacttcctccggcagggcgagataaaaatcggtgaattcgatttctcttgtttcgataagctgaaccaattcttcgacatttatttttccaaagaagatgaggaagaagtggaattcattggcttgccaaacgaaaactatcagcggttcattgattgcgctgctgataaaaatcttgggaagggaaagaagaagggcgatcttttgaaattgatgtctttctcagaagatgaaaagcctttctgcgaaatgttttgcagtttgtgcgccggattggctttctcaacgaaaaagctgaacaaaaaggacgagaccgtttttgaagacatcaaagtcgaattcaacgggaaatttgatgacaagcaagaagaaatcaagagcgttctcggcgacgcctacgacctagttgaattagcgaagttcattttcgattattgtgatttgaaggacattttgggagcttcgacgaaccgcctttcggaggcctttgccggtatatacgattcccataaagaggagttgaaggcgcttaaaggcatttgccgggagattgaccggtccttgggaaatgaatcaaaaaactcgctttatcgggaagttttcaacgataagggcattccaaacaattacgcagctttcatccatcatgaaaccaattcttctcgctgtggtatcgccgatttcaacaattatgtcttgcagaaaattgagcctctcgaaaatttactttccaagcaaaactataaaaattggattcaactcaagcaacttgcaagccaaggacggcttttacaaacgattgcaatccgctccacaagcatcatcccgatgcagcttcatttgaaggatttaaagcttattttggccaatgctgagaaacgcgatatcccgggtatcaaagacatcaaagaaaagattcttcttttgttccaattcaaagttccttattactgcggcccgcttaccgatcgaagccaatattccaatgtggttttaaaagcgggaacccgcgaaaagatcaccccttggaattttgcggatcaagtcgaccttgaagagacgaagaaaaaattcatggaagggttgacgaataaatgcacatacttgaaggattgcaacgttcttcccagacaatcattaatgttccaagaatacgatgcctggaataaattgaacaacctctccatcaacgggaataagccatctcccgaggagatgaatgcgctctttgatttcgcgtcgaagcgtcggaaaaccacgatgtctgacatcaagaaattcgaaaagcgcgcgaccatgtccaaagagaacgatgttacggtgtcgggatggaacgagaacgattttattgatttgtcctcgttcgtctctttgtctggctttttcgacctaggcgaaatccattcggccgattacatggcgtgcgaagaggccattttactcaaaacgattttcaccgacgccccacaggacgcagatccaatcatcgctgagaaatttcccaatcttaagccgaatcagctcgccgctttgaaaaaaatgagttgcaaaggctgggcgacattatctcgggaattcctaaccttaaaggccgtcgatgccgacggggaagtgatgaatgagactcttttaggcttgatgaaagagggaaaagggaatctcatgcagcttctccattcctcgctttataacttccaagacgtgatcgattcgcacaaccgcgctgtgttcggtgataaatcccctaagcaaatcgccaacgacttaattgaggaaatgcctcctcagatgaggcgccctgttattcaggccctcagaatcgtgagggaggtttccaaagtcgcgaaaaaacaacctgatgttatttctatcgaagtaactcgcgaaagcaacgacaagaaaaagaaagaggagtggagtaaaaaggcgaccgaccggaaaaagcaaatcgatctctttttgaaaaacttgaagaagactgaagacgtaaaacagacggaaagcgagttagatggacaagcgatcaacgacattgattccatccgcggcaagcatctgtatctttatttcctccaaaacgggaaagatgcctatacaggtttgccaattgacattaacgatgtcttgaatggaaccaaatacgacacggatcacatcattccccaaagtttgatgaaggacgattccatcgacaacttggttttggtcaatcgagagaagaaccagcataaatcgaatgaattcccccttccaagggacattcagaccaaggccaatatcgaacgatggagagctttaaagaaagcaggaggaatgtctgaaaagaaattcaacaatctgacgcggacaacccctcttacggaagaagagctcagcgctttcgtcgcggctcagattaatgtggtcaatcgttccaatgtcgttattcgtgacgttttgaagatcttataccccaatgccaaattgatattctccaaagcccaatacccctcccaaattcgtcgggacctcgagattccaaaattaagggatctgaatgatacccaccatgcagtagatgcgtttttgaatatcgtctccggcgtggaactcacgaaacaatttgggcgtatggatgtcattaaagccgcggcaaaaggggacaaagatcattctttgaacatgacaagataccttgagcgccttcttaaaaaggtggacgaaaataagaacgaaaccatgacggagctcgggaatcacgtctttgttacttcccagcggcacgatttccttttgacttatcgtttcgattatcaggacagcgctttctacaacgcgacaatctatagtccggataaaaatttaattccgatgcatgatgggatggatcctgagcgatatggaggctattcgtctttgaatattgaatataactgcattgccacgatcaaagggaagaaaaaaacaacccgttatcttttaggagtgccgcatttgcttgcactgaaattcaaaaacgacgggatagatataacttccgatttgattaaattagttccacacaaaggtgatgaagaagtttcgattgactggaaaaatccaatacctcttcgcattactgtgaaaaaagatggcgtcgaatatttactggccccttttaatgcacaagtaatggaattaaagcctgtttcgcccgtcttcctaccgcgagaggccgcagaatatttggcaagattaaagaaggccgttgaccaaaaaaagcagtttatttatcagaattcagcggaaatatttcaaagcaaagacaaaaacaatgctttacaatttggcccggaacaatcaaaaaacgtcgctttgaaaatatatgctttggctgacgctaaaaaatatgactattgcgcgatgatttctaaattgcgcgatgcagctctacgggctgaaatgttggattcgttatcctcggaagcgctttttaagcaatacaatgatcttatttcccttttgtctcagctgactcggagatcaaaaaagattagttcaaaatatttctcaaaatctagaggagcgctactgcaggatggcctaaaaatcgtctccaaatccataaccgggctatacgaaacggaaaggaatctctga

SEQ ID NO: 204 - DNA, 4578 bp, unidentified
  misc_feature 1..4578: note = Synthetic sequence or unknown origin
  source 1..4578: mol_type = other DNA
atgaaaaaaatattaggacttgatttaggaacaaacagcataggctgggcagtagtcaatgctgatgatgaattggataaagtgaccgggattgtggcagcaggtagccgaattatcccgatgaccgccgatgagctaaaggctttcaatagtgccgacacttccaagcaatcgaaatgtgctgcacgtacacagtttcgcagtattaggcgcaacatagagcgcacgaagctgcgccgaagccgtctgctcagagtgcttaatgctctcggatttcttcccgagcattttgcgtctcagattgaccgttacgggaatctaattgacggtaaggaacctaagctggcttggcacaaagatgcacagggaaaaatgcaatttcttttcaaggcatcatttgagcagatggtgcatgagtttcacaatgtacaccctgaattagtggcaaacaacaaacttataccctacgactggacactatattatctgcgcaagaaggctttgaggcagcgcatcaccaaagaggaacttgcctggattctccttagtttcaaccagaaacgtggctattatcagcttagaggcgaagatgacgataaagaaggcgagcgaaaagagtttatggagctaaaagtgcttgatgtgaaacccgaagacaacccgaaaggtaaaggcaaacagtggtttattgcacaattggaaaatgggcttgtatataggagtaccaattcaaggcttccattgtggcaaggaaagacaaaagcattcatagtgacatataagctaaatgctgatggcacgataaaaaaggacaaagaagggaatgactgttgctcaatgactatgcctcagagtgatgatgattggaatctcctcaaggagaaaaccaagaaggacatcgataactctggaaagactgtgggtgaatacatatatgatgccattctatccaagcccgatgtgaaaattcgtggtggacttgtacgtacaattgagcgtagtttctacaaagacgaattgcgccagattctatccactcaatgctcgctgcatgatgagctgcacaaccgtgaactctatgataagtgcatcaacgtgctatacgcttcaaatgaagcatacaggcaaagcatctcaggacgtgatttcgtgtatctgtttttagatgacataattttctatcagcgtccgctcaaaagcaagacttcactcatagctgattgcccatttgaggttaggcacgataaagatggcaaaaaaatcccggtgaaatgtgcacccaagtcgcacccgctgttccaggaattcagaatatggcaatttatggcaaatttgcgaatactgtgccgcgaatgtgtggtagatgggcactcgaagaccgacatagatgtgacacagcagtatcttggcactgaaacacagaggttgaagctattcaattatctaaatgatcgcaagagtgtaaagcagaaggatttacttgggttcatcttcgggaaaaacgaaacagagcggtatcgctggaattatgtagatgaccccgacaaggaatatccgtgcaatcccactcgcgccgatatgcttgctgtgctaaagaaacttgagaaactcacaggcactcatatcgggctgttgcctacatggcgtgagccttgtggcactcatgaaggggaaatcaaggaaaccgacttgtggcacattctatattcggttacctcaatgagtgaactaaaagcagcattgcacacatttgctcatcgcaataacttgcctgacgaatttgttgatgaggctgcgaaaatcaagccttacgagcgcgactatgcagcttactcgcttaaagcaataaagaagttactcccacttatgcgttgtggcgaaatgtggagctatgataatatcgacagtgctacaaggcaacggattgaaaatctggtgaatggtgagtttgatgagactatatccaaccgagtgagggaaaagtcgattcacatcacatcaccctatgattttaagggattgccacagtggcttgcttgctatgtggtatataacaggcactctgaagccggcactgatgctaagtggaagacacctgatgatatgcatggatttatcacgacattcaagcatggctcgcttcgcaatccggtagtggaacaggtggtgctcgaaaccctgcgcattgttgccgacatttggcaacagcatggcacaatagatgaaattcacgtggagcttggtagggaaatgaagaatcctgccgataagcgcaagcgaatatatcagactattgatgccaatgagaaaacgaatgcacgcatacgctacatgttgcaagattttttgaacccacagctcgaaattgagggagtaagtccggattctccatatcagcaggaattgcttaagatttatgaagatggcgcatttgcgtcggattctgatgtgcccaaggatattatagagattcgggctaaatatactcaaaatgaagcgtcaaagcgcccgtcggcaaaagaggttgaaagatataagttgtggctcgagcagaggtatcgttccccctacaccggtcaaacaataccactgtcgaggctctttacccgcgactatgagattgagcatgtgattccacaatcgcgattcttcgatgactcattttctaataaggtgatatgcgagtcggcggtaaataaactgaaggataagctgctgggctatgagtttgtcaagaagcatcatggcgagattgtagaatgtggatttgacagaaaggttaatatccttgaagtggatgcctatgagcggttggtggcaaatatgtatgcagccaataaggcaaagcgtgagaaactgatgatggaggatatccccgatactttcattgcacgacaactgaatgattcacgatatataagtcgctatatcctctcgcttctgtcgcggattgtgcgcgacgatgatgagcaggagagcacatcgaagcacgtgattcccgtgaatggagccatcaccgaccgattgaagcaggattggggcgtaaacaataagtggaacgagctgattttgccgcgattcgagcgaatgaacaagattacaggaactcatgacttcacttatgtgaacaaggagggaaaattggtcccgactgtgcctataggcatgatgaagggctttagcaagaagcgaatcgaccaccgtcaccatgcaatggatgccattgtgattgcctgcaccactcgcagccatgtgaatttgctaaataatgagtcggcgcgctcaggcaatcgagagatgcgctatgcactatcgtgcaaactgcgccgcaaaggggatgtggtgatagatggtgtcaagaaaacggtgtttaaggagttctatttgccctggaatagcttcccggatgatgtactcagcacactgcaaggcatcatagtgagcttcaagagcaaagtgcggataatccagaaatccaccaatagatatacacgatttgtggagaaagatggaatgaagaataaagtggtagattggcaggacagtagcaggaatgtaaccgtgcgaaagtcgctgcacaaagatactgtatttggattggtgaatatacgtcggaagaaaattgtgagaatagcatcagccgttgacactccgagcatgattgttaataaggaattaaaggatatagtacaccgattgattgaaaagtatggcaatgctgaccgtgttaagaagcacttaaaggacaatgctgtgatgtactcacaatttgatttgaataaagttgaaatttacgagtttacaaacgctaccaaagaacctatggtggctactcgtgccgacttggtatcgaagtttagtgatatttcaggaaaggaatcgaagattctgcaacgaatagaagaaataactgatacgggaatacagaaaatattgttggcacatcttgaagcaaatcgagacaatctggattttgctttctctcctgagggattagtacaaatgaatgagaatatcgctctgcttaatggtggcgtgcctcacaagccaatagtgaaagcaagatttatggaacccctgggtatgaagcatcctaaaggcaattcaggctgcaagattgctcaatatgtggaagctcaaaaaggaactaatcttttctatgcaatatatattgattcaaatggtaaacgcatatttagtacaatcccattgatagaatcgattgctttgcaagaagccggactttcacctgtggcaactcaagatgagaatggaaacagattgctgttttatttgagtccgggtgatttagtatatgtgccgactgcagaagaaattgagatgggtatgattgcagaagaaattgataaaaacaggatttataaagcggtatcttttaatggcgctcaggctttttttataaaaagttctgtggcaacttcaatcatcgacaaaaaagaatatggaccccttaataagatggaaaggtcgattactgatgaaatgataaaagcaatttgtattcccataaaagttgatagattaggtaatatcattatgcttaatcctaagttatga

SEQ ID NO: 205 - DNA, 4125 bp, unidentified
  misc_feature 1..4125: note = Synthetic sequence or unknown origin
  source 1..4125: mol_type = other DNA
atgggtaaaaagtattatttggggttagatatgggaactaattctgtaggatgggcagttgttgatactgattataaattgcttcgtgctaagggcaaagatctgtggggagtacgtttatttgaggaagcacatactgctgctgaaagaagaggatatagagtgtccagaaggcgtcgaagtcgtgaaatagcaagaattggtatgttaaaagaattttttgctgacgctattgaggcaaaagatcctggattctttgctagaatagaggaaagtaaattccataaggaagaacggaatgaaggaaataagcaaccatatgctatatttgcagatactggttatactgacaaggagtattatgaacaatatcctacgatttttcatttacgcaaggaacttttggaaaagaaagaaccacacgatgttcgtttggtttatttagcaatttctaatttatataaaaggcgaggacattttctggacgctacattaagcgagaacgaagaaactgattcaatggtagcattattggatggatgtatttctaaaatggtagatttagaaatggaagtacctgtaaacgtagatgctattgaattagaagaagtactgggaactaagggagtttcgcgtaagagaattttggaatccctatgtactatgtggggaatcgataaaaagaaaaagagtctttatgctttggcaagtcttttgtgcggaatgtcttgtaaaatgattgacttgtttggggaagaagtaattgatgaagaacataaaagaatagcggtatcttttagagattcacgatatgaagaaattgtttcggagttacaggatgttttaggtgatgatagatttgatttgatttgtgttttcaaggagattcatgacaaaggtatgctttcaaatcttatgaaaggatatgactttttatcacaagccagagttgcgatatacgaagaacataagttggatttgcttatgttaaagaaagtactaaaaaagtacgatgccaaagaatatgaaaatatgtttcgtattatgaaagaaaataactatagtgcatatgtaggaagtgtaaatagtcatgataagattcgaagaggcggaagtaaaaatagggaagagtttttaaagtatgttaagaaagttgtgagcaatcaaacagtatttccatctgatgatgatgatgtttgcaatattctgcagagaatagaagacgatatctttatgcctaaacagttgacagcaagtaatggtgtgattcccaatcaattacatttacgcgagatgtctaagattttaaagaatgctgagaattatttggagtttcttaaagaaagagatgagtcaggattaacagtttccgaaaaaatattacaggtatataagtttcaaataccatactatgtaggccccattccttattgtatgagtgggactgatgactataataatttaacaaaatatcataatgtttgggcagaaagaaaagaattgggaaaagtttgtccttggaattttgaggagaagattgatataaagaaatctgctgagaattttattattcgtatggtgcggcactgtagctaccttgcaggagagaatgcattacccaagaattctatgttatatgagaaatttatggtccttgatgagttaaataatttaagaatcaatggtgaaaaactaacagtagaacagaagcagaatatttatcatgacttgtttggtcaaggtaaaaaggtaaatatgaaaagcttggccaattattttgtacgtaatggaattattcaaaaagaccaggcagagtcagctgtttccggtattgatggaggttttcgcgcatcgttgagtacagtgggtaagttttatggcatttttggtgaagctgtataccatgatgaaaatgtaaaagcaattgaagatatagttttttggggagcagtatacggaaatgacaaaaaaatgcttaaagaaaaaataaatgaaaaatataaggataagttttctgagcaggaactaaagagaattttgggatttaagtttgaaggatggggaaggctttccagaagtttttttgaattagaaggtgaatctacagaagatggagtttgtcgtacatttatccaagcattgtgggaaacaaatgataatcatatggagttgatgagtagtaaatatacatacaaagaggaattggaaaaaaaacttcaattggtggaaaaacctttaaaggagtggaattttgaggacttggatgatatgtatatgtctgctcctgttaaaagaatggtttggcagacgatttccattatgaaagagttggaagatgtattggggaatggtccggagaggatttttgtagagatggccagggaagaaggagaaaagaataaaagaaccatttccagaaaacaaaagctgatagatttatataaggctataggaaaagaaggtaaagaatggtgcaaggaagttgaaggaatggaggaggcctcttttaagaatcggaaattatatctatattacttgcagatgggaaaatgcatttatacagagcagaatattgatttacatactttgctcacttcaaacacaatctatgatatagatcatatttatccgcaacattatattaaggatgacagtttagaaaataatttggttttagcattaaaggattataataataatgtgaagaaggatattgtgcctttacctacagaaaccagaaagaacagacgagcatattgggaagtgttaaaaaataagggatttatttctcaagaaaaatttagccgtttgacaagaaatataggttttactgaagaagaattggctggatttattaatagacagttggtggaaacacgtcagggaacaaagagcataacacagattttgaagcatgcttacccaatgtcggaaatagtatttgcaaaagcaggagcggtttctgagtttaggaaaaagtttgatttacttaaggtacgctgtataaataattatcatcatgcacatgatgcctatttgaatattgtagttggtaatacttattttgttaaatttacaaaaaatccatataacttcatcaaagaagtagttaaaaatcccaacaaagttgaaaataagtaccatatgggtcaggtatttgattggaatgtttgtagaaatggggaaaatgcatggattaaggataaaactattgatacagtgaaagctgtattaggtaagaattcgccattggttacaaggtatgctacggaatatcatgggggaataacccagaaagtaactatttataaagtctcaccagaaaagaaggattcatatattccagtgaaaatgcgggatgagaggcttaaagatgtcactaaatatggtgggttgagagatgtggcaatatctggttattcgttggttgaatataaggtggatgataacgtagtacgtagtttggaatctatacctgtatatcttggaagggtagagagtttggcggatgaaactatagtggcttattgtcagcaaatgttacaaagggaatataagaaaaaaatagtttcgtgtattagaatttgttataaatttatacctagtgaatccttgatccgatacaatggatattattattatttgggtggaaaaacagataggtatatttgggtaagaagtgcaattgagttatgcatcgatagtaaaaaggcaaaatatattaagaaaattgagaaggcgataaaaagtaattcttttgaagaaaaaggacatgatggtaaaagagttttatctgtacaaagcaacatagaattatggagttggattagtaataagtttgttactggcatttatgcaaagcagatagggaccataaaaggtattatagcgaatagtgaggagcagtttatttcattgacattagaacaacaatgttatgttatttatgaaataattaagtatattaatactagtgatatgacagatgtagcacttattggaggaagtagtaaaagtggaaaaatgagaataagtaaaaaaataacagatgttagggaaatagtacttgttcaccaatcagtaaccgggttatatagagcagaagtaaatctgcttacagtatga

SEQ ID NO: 206 - DNA, 4143 bp, unidentified
  misc_feature 1..4143: note = Synthetic sequence or unknown origin
  source 1..4143: mol_type = other DNA
atggaacaaaattattatctgggactggatattggaacgaactcagtgggctgggcagtgacggattcgtcctatcatctttgccagtttaaacataaagatatgtggggaattcgcctttttgatgaagctaaaactgcgcaggaacgaaggactgctcggtgtgccagaagaaggctggagcgcagaaagcagcgtattgatttgctacaggaactatttgctgtcgagatgaacaaagtagacgataccttttttattcggttaaatgagagtaggctacacttggaagataagatagtaccagcaaagcacccgctgtttcgagaagagaactataccgacagggaatattatcaggaatatccgactatttttcacttgcggaaagatttgattgaagacaaggcaccgcatgatattcgtcttgtctatctggcattacaccatatcatcaaaaaccgagggcatttcctgattactggaggtttcagcgacgcgaaaagttttgcggccaccatgcggaatttgcaggaggcggtacagaacgaatttgactttgagctgtatctggatgaaactggtttggcagattttgaacgtatcttgcaaagccgagacgatgccaaaagtgtgaaagccaaaaagttgctggggctgttttcctttactcatttagaaaatgatgaagcaatgcggaaaaaaacaatagtggaccaggtctgcaagtttgtgtgcggtatgactggagatgtatgtaagttgtttgcaatggattcagaagaatctggcttggagaagacaaaattttcttttggagatgcccaatatgaagaatccattgctgatcagttggagggcgcactcccagagaaattttatgtcttggaatgtatgaaagcactgtatgattggagtattcttgcggatattctggccggtgaggactatatttcttttgccaaagtgaagcagtatgcgctgcataaagaaaatctaaagcgattgcgtgtttttatgcggaagtattgtgacaaacatacgagggaacagtttttcaatgcgcatcagcaggaaaaaggcaatacaaagctgtgcaattatgctgcctatgttggaagtgtgaaaaagaatggaaaagaatattctgtggcccgttgctctgaggaagaattttatcaaggtctgaaaaaaattttggaagcggttacagtgactgcggaagatgctgcggaaaaagaatatctgctgcagcatactcaattacacacgctgcttcctttacagcgcagcaaggacaatgggactgtccccaagcaaatccacgagttggaactgaataagattttggaacaggcttgtcaatatctgccctttttgaatgatacagatggggaaggaatttctgtggcaaagaaaattaaagatatttttaatttccgaataccctattatgtaggaccactgagcgaccggcaccgggcgcagggcgcgaataattggatgatacggcgggaaggcaggacagaacgtatttatccgtggaattttgagcaagttgtagacatggaacaatccaatacagcctttatcacacgtatgaccaataaatgcacctatctggtgggtgaagatgtattgcccaaacattcgctgctgtattcaacttttatggtgctgaatgccatcaaccccttgaaaatcaaaggatatcctgctacagagttgcaaaaacaaaatatttttcggcatgtatttttgaagcatcagaaggtaactgcgaaagagattatagagtatctaaatcaggaagatcctgggttgaaactaaccgaggatgatttgagcgggtttgacgaaaacggtaaggtatccatgtcctcttatctggatttctggaagaaagtatttggcgaacgcatggcagaaaatgctgtgcaggcaatggtagaggacattattaagtggaaaacgatttacggcgatgacaaacagatgctcaaacggatcattcagcagcattatcctgatcagctaacagatgctcagttaaaagcagtagctggatttcgctacagtggatggggaaatttttcaaaagcatttctgaatgggatacaaggaatcgatacggaaacaggggaaacattcaccataattaaggcgttgtggaatactaactgcaatttgatgcaactgttgagcggtcgtttcactttccagcaacagattactgagcataataaggcgcaaattggcgagatgacacagattagttatgagaatgtagtggaaccgcttgccgtatcaccggctgtaaaacgctcaatctggcagactgtacagattgtacaagaaataaaacagattatgggtgctgcgccgcagaaaatctttattgaaatggttcgtgatgatgacagtaaagggaaaaagaaagggcggacggcatctcgtaagcagcaattactggaattgtatgcagcctgtgaagctgatgtacgggaatggagtcaggaaattgaaggcaaggatgaaagagcgtttaacagcttgaagctctacttgtactatctgcaaaaaggcagatgtatgtacactggtgaacgtattgacttggatgagctgatgaagagtaattccaaatgggacaaggatcatatttatccgcaatccaaaattaaagatgacagtttggacaatttggttttggtgaacaaagaagtaaatgccaagaagagcaatgaattactttcagcggaaattgtacagaaacagagatctttctgggaaaatctgttgaaagaaggattcctgtccaaaaagaaatatgatcggctgacccgtatcaatgattttacggaagaagaactatctggctttatcagtcgccaattggtagaaacccggcaatcttctaaagcagtaaaagatctactggagcagctgtatcctgatacggccattgtatcagtcaaggcagggctggtatcccaatttcgcaaaaaagatctgtgcgaattgaaatcacgtcggctgaatgatttacaccatgctaaagacgcttatctcaatattgtagtaggcaatgtctattatgaaaaatttactgccaaccccattcgctggatgaaagagaatagaaggacaaattacagtatcaaccgtgtttttgaatatgatacgaaaaaacgggatgaatggatttggcaggcgccgccgaaaaatgaaaggggaaaagtttgccggggagagcgggaggaactgctgggcggcactatagatgtggtacgggaaaccgtacagcgcaatcggatgtgctacacggaatatacctactgtgaaaaaggagaactgtttgcggccaatccaaaacatgtagaaagcgccaagattccgctaaaggcagggctggagcctgaaaaatatggcgggtattatagtccaaaaagttcctatttcgcactggttgagtttgacggcaaaaagaaagggacacggattagaaatattatcggtgttcccatctatattgccaatatgctgccgcaccgaccggacgcttttttgcactattgcgaagaggtcaaaggattggtcaatgtgacagtgctatatgcaaagattaagaaaaatgcgctgctgctggtagatggctttccgctgcgcattaagggagaaaatgaaacagatattatgtttaagcaaaatctgcagctggttttaagacagggtgatgcagaaacggtgtggcggattgaaaaatatttggagaagaataaggactatgctgtggatgaaaaattcgacagcctgagtgatgacagtatgatgcagctctatgatgtgttgacagaaaaactgcaaacggtatacagtcgccgtccggctaacaaaggacagacactggtggaaaaacgagaggtatttgcaaagctgaatggaaatacaaaggctgtgattttgaatgaaatattgaccatgctgcgctgtgatacggctaccacagcaaacttaaaggggatagaggataaggaaaatgcaggtagtattaaaatgaaaaaaagcacagttggcaaaagtaagctggtactggtcaaccagtcggtgaccggtctcttggaaaacagaacggagctgtaa

SEQ ID NO: 207 - DNA, 4146 bp, unidentified
  misc_feature 1..4146: note = Synthetic sequence or unknown origin
  source 1..4146: mol_type = other DNA
gtggcaaatgaaaaaaactttttaggattggatataggctcaaattctgttggctgggcagtgacagatgaaaactacaagataaaaaaatacaaaggcaaccttatgtggggggtacatctgtttgatgaagcacagcagtcggctgacagaagaatgtttcgtactgctcgccgcagacttgacagacgtcagcagaggatagttcttcttcaagaactctttgcagcagatattttgaaaaaggatgagaattttttcctgagattgaaagagagtgcccttttgcctgaggattcggaaaaccgaaagcataatattttcttcgatgatgaaaactacggcgataaggagtattttaatgaatatccgactatacatcatttgatcgttgaacttatgaactgcgattctcctcacgatatcagacttgtatattatgcctgtgcatatatccttgcacacagaggacatttcctttttaatgttgaaaaggatgacattgagaagatcacggaattcaaacctttgtacaaaaagttttattctgatctgacagagctttgcgaaactcctgcgtttgatgagaatgctgagataatggaggaagtgctgaaaaagcatatttccgtgaccgcaaaggataaggaactgaaacagattcttttcgggggaaaagtccctaaagatattgatacgataaagtatgagctgcttacaaagctgatatgcggcggaactgttaagatgtcagagcttttcagaaaagaggaatattcagagcttgaaaagaattctatctgtgtgaaaagtgctgatttttctgatacgctggaaagccttgaaagacagcttgatgaacttcactttgcacttattgcaagtgtcaaagcaatgtatgactggtctctgcttgttgatattcttcatggtgaaactatgatctcaaaatcaaaagttgaagtatacgatcaacataaagccgatcttaaagaacttaaatattttataaagacatatcttgataaaacagattataatgctatattccgtgatgtttctgataaggcaaactatgtgagctatgtctataatgcaccctctgaaaatgacagaaacaagtataaaaaatgtttacaggaggatttctgcaagttcctgaagccttatttggaaaaaataactccgaccgatgacgataaagagcgatttgaagaattaaagaaaaaacgtgaagataatgaactttgtccgaaacaggtcactaccgataaccgtgttataccatatcagctttattatgcggagctgaaaaagatcctcgaaaatgcctgcaagtatcttccgtttctgaatgaaaaggacgaatacggaacggtcgcagagaaaatactgaaaataatggagttccgcataccttattatgcaggtcctcttgttggcagagaaaaaagtgataatgcgtggctgaaaagaaaagctgatggcagaatttatccctggaatttcagcgaactcgttgatgaggatgagtctgagaatgagtttatccgccgtatgacctgcaaatgtacttatcttgcaggagaagatgttattcctaagtattctctgctctacagtaaattcatggtgctcaacgagataaataatatcaaggtaaacggtgagctcatatctgttgaagcaaaacagaaactttatcaggagaagtttgttgaaagcaaagcaagggtaacaaagaagcgtatcagggagttccttgtttctatcggagaatatagcggagacgtcgaagtaacaggcgttgatgatacaataaagtcatcgctcagatcctatcacgatttcaagcatcttattgattgtggcttgctaaaagaattcgatgtcgagaagatcatcgaaagaataactgtcacaactgacacaaagcgcctcaaaaactggcttaagcaggaatatcctcagctttcagcaagcgatgtaaaatacatttccaagctgaaatacaaggactatggcaggctttcaaggcgtttccttgaggagattattccgatagatgctgatacaggtgaagtattaggtgataataatatcatcacagctctctgggaaaccaatagtaatcttatgcagcttttgagtatggggaaaggttattcaaaggcaattgagaagttcaataataactacttcgatcagcacccggatgaaaagagtatcagcaaacgccttaaaaatatgtacgtccccacagcagtaagacgctctataactcgaacccttgatattgccaaagagcttaaaacgatactaaaaaaagctcctgacaagatattcatcgaaatggcaagaggtgaaggagataccccaaagggcagcagaacgaaatcaagacgtgatcagataacagaatatttagacaactctgatgctgaaaatattggtgagcttcgtgaacgtcttgaaaagacagacgatggcagacttcgcagcgagaaaatattcctgtactttatgcagcttggaaaatgcgcctatacagaaaaaaacatcagctttgacgaactggatgacaacaccaaatggaatatcgaccatatctggccccaggcaaagatcaaggacgacagtatcgacaacaaggtccttgtcgattctaatgctaatggtgcaaaaggcgataaatatcccattagctctgatataagaagcaaaatgtcaggtttctggcacgctctctataagaaaaacatgatgagtgaaaagaagtatcagcgccttatgagaagtacttcttttaccgaggaagagttatcaggcttcattgcccgtcagcttgtagaaacaaggcagtcaacgaaagctgttgcaactattctgaaagagatctttcccgaaagcgagatagtatatgttaaggctggtatcgtttcggaattcagacaggaaatggatatgatgaaatgccgtgagataaacgatcttcatcatgcgaaggacgcctatctgaatatcgttatgggaaatgtttatgatactaaattcactaaagacccgctcaatttcatcaaaagcggcgaacgctattctatgaaactgttcaagaaagatcagagcggaaagaaaagcggtctgttgacaggtgttgttaaaagaggagataacattgcatgggatcctgagacttcatttgatatagtaaagcacatgatgtcaaagaatagcataaggtatgtgaggtatacatacaggcgtaaaggcggactgttcaatcagatgccagaacgtaaaaaagctggtctcgttccacgaaagaagggacttgatactgaaaagtatggtggatataacaatacaacagtatcatcatttgctgtaataaaatgtaaaacagacgtgataattattcctgttgaattgaagtgttataatcaattcttttcagatattgattttgcgaaaaaatattcatatgaaaagttgaaatatattttaccagataaaaaatataaaggaattacaaaagatgatatcgttttaccaactatagattatcaaaataacgcaggaatacggacagctgaacttaaaatcaacagtatagttgaggtcaattgttatcctatctctttatgctctaaagatagtaaaggtaaatacataatcgttgcttctcccgtatctttgatagtagacaagaattcagagaattacataaaaaagataataggtttttttgagaaagagcctaatagaaaaataacaagttataataatatttcaaaagaacataatcttgatatctatgacataataatgcataaatgcggtgaaaagccttttaatatatggagcaaatttgcagatatggctgatgttttacagaaaaagcgtaacatattctttgaactttcagtagaagaacaagtcaaggctttgaaggagataataagtattctcaaatcgggacgttctgtattttgtaatttaagttatttgaatgaaagcaaacagtcctgcatttcaaaactcggagcagtattgactggtaataagaaaataaaatcagtagttatagttgaccaatctcctaccggactttttgagaagaagtctgtaaatctgcttgagctatga

SEQ ID NO: 208 - DNA, 4146 bp, unidentified
  misc_feature 1..4146: note = Synthetic sequence or unknown origin
  source 1..4146: mol_type = other DNA
atggaatattatattgggctggatatggggacaaattcagtcgggtgggctgtgaccgatgtgaattataacttgattagaaaaaaagggaaggacatgtgggggatccgagagtttgatgaagctgaatcagcagcggagagacgtgttcatcgtgtgggaagacgttctcatcagagaagtcaggtaaatattggattgctgaaggaaatattcgcaaatgcacttgctgcagaggatgaaaattttctagcacgtttggacaatagcttttacaaggctgaagataaagatgaaaatcttacaacgctggatggaatatttgcggatgcagactatcacgatgctgattattataaggaatatccaaccatttttcatttaaaatacgatttgataatggataaggttccaaatgatggaagatacgccagaaaagtgtatttggcgctcaataattatttcaaaagacgaggccattttttgaatgaaagtctttccggcagtgatgaaggcggtaaggatatatggactgcatatgtagaattgtgtgatacagtgtatgaagaatttgatattgtactggcgcatgagtatgaattagagaacaaattcagatccgtattttgtgatgcgtctctttcgcgaagcagaaagagggacatgctgatggatttatttggtatgaccaaaaaagaaaatgcacagcaatatatgattttgggcgcaatttgcggcttgaaaacagatttgttaaaattgttatctattgagtcggaacaaaaagcagatttagaattttcttccgctggttttgaagataaacttccggaaatttatgcaatcataggggaatcttatgcaaatttgattgaatctatgaagcaggtatatgatgcaggtgttcttgccgggatcatgtctggagtagatgcggagggaaatccgatcgcatggctgtcgcaagcaagggtaaccagctataagaaacataagaaagatctgcacattttgaaggagtgtattcataaatattgcgatgagaaagaatataatcatttgtttcgcgagaacgcggatggatcgtatagtgcatatgttgggactgtaaattcagagtctaaggtgcgcagaggagaagtactgcatgcatcaaagtcgggggaacgatacgcaaatttggcgaaacggattaaaacggacttggaaccatatgcgaatgacgaaaatgtcagatatattttggacgaactgaaagcagagacgtttcttccaaagcagttgacttttgcaaatggagttattccgaatcagcttcacgaaagggaagtgcgccggattctggataatgcttctaaatatcttccttttttgcaggaaaaagatgaatcaggactcacgaattcagaaaagattatccgtctgtttacattccgggttccatattatattggaccggtcagccagaactataaaggaaatgggtgggcggtaagaagagccggaatggaaaagaaaacggtctatccgtggaatatggaggctgttattaactatgatgatacaagagaagcattcataactaagatggtcagggaatgctcttacattgccggagagaaggttcttcctaaagaatccatggaatatcaggcatttatggtgcttaatacaattaataatatcaaggtgaaggatgagaagatttcctgtgaattaaaacaggatatttaccatgatatttttgaaaaaaatggaagaataaccaagaaaaaaatactgacatatttaaatcagcgtggtttttccgtggaggagaatgaactgggtggtatagatgctgttattggatgtcagttatctacgtacaggcggttttatggtgtcttgggagatgatttatccaaagacagtgtaagacacatggtggaggatattgtattcaagggaacggtgtatggcgattccaaagcgatgttgaaagacatgattgcagaaaagtacagtgatgagttgtccaaagaacagatgaaacgcatactgggctttaaatatagggactggggcaatctgtcaaagcagttcttggaaatggaaggatgtaataagcagactggggaaattacgtccctgatacgtgcgttgtgggaggataatcttaatttgatggaactcctgcatagcgataaatatacgtttgcggatactctgaaggaaaaacaccaaaagaatatgaagtcactgacagaatttaactttgaagatttggaggaaatgtatttcagttcacctgttaaacgtatgatatggcagactcttttgatcatacgtgaggtcacggaaatccttggctgtgctccgacaaaaatatttgtcgagatgacaaggtcggaagacgaaaaaaagggggatgcgggcagaaaagattccagagagaaggagttgctggaactgtacaagtcgataaaggatgatagaagctgggacgaagagattaagaatgccggggcatcggggaaactccggagcaagaaaatgtacctgtattacaaacagatgggaagagatatgtatacaggacttccaattgacttgaatgagctttttgatgataacaaatatgatatcgatcatatttatccgcggcattttgtgaaggatgatagtatacataataatcttgtgcttgtggataaacgaaaaaacagccgaaaaagtgataattatccgattgataaatctatcagagaggatggaaaaatcactgcgtattggaggatgcttcatgataagaagctgatgaatgatgagaaatacaggagacttacgggaaacagaccttttacggaggagcaggaggcagattttattgcaaggcaattagttgagacaagtcaggcaacaaaaggggtaaatgaccttttgaaagagctgcttcccaagaataccatactcgtttatgcaaaagccgtaaacgtgagcgaatttcgcaagcaattcgatttttataagagcaggacaataaatgattttcatcatgcgcatgatgcgtacctcaacatagtggtggggaatgtgtattttacaaaatttacagcgaatccgctgaacttcattaagaaggagaagaaggagtatcatctggggcgtatgtttgaccgcgatgtggaacgaaatggatacatcgcatggaaagctccgatttatgacaaagagaccaaaagaatggtagaaccgggcgagtctcttacaacagtgcggaaggtgctggcaacacacacaccgctgcttacaagactcagtacaacgcagcatggcgcaatttcggattccacaatctgtagtgcagcgaaggcgaaaaaggacggatatcttccggtaaagagtttaagcaatcctaagctgatggacgttaccaagtatggtggattcaacagtattaagaatgcatatttctttttagtggaacatgaggtagatggaaaagggaaggataaaggaaagccggtcaagattcgtacgttggaatgtctgcctgtatataagagagcttatgtggaaagccatgaggaagggctgtatcaatattgccttgagcttggacttaaaaatccatctatccgaatgaaaaaaatcaaaccgcaatcgctgattaaagtggatgggtttccgttgtatatcacgggaaagtccgagaatcgctttgttgtaagaaatgcttgtaatctggtacttggcgcgcagtggaatcaatatatacatgcaattgaaaaaagtaatttatcggggcggatttcggagaacatcacggtagaggataatgttcggctatatgatgaattaatgaaaaagcatacagaagatatatatgcaaaacggccaaattcggttggggagatattgaataaggggcgcgcaaaatttgttgatttggatgttgcgaaacaggtatataccctgactcaaatcttgaatttatcattgatatgcaattcggctcttgctgatttaaatctgattggaggaagtacaaaaacaggagttgcgcgtattagtaagagtgtatcaggatacaaagaatttaaattgatcaactgttctgtaacaggtatgtttgaaaaggaagtggatcttttaaaagtatga

SEQ ID NO: 209 - DNA, 4185 bp, unidentified
  misc_feature 1..4185: note = Synthetic sequence or unknown origin
  source 1..4185: mol_type = other DNA
gtgagtaaagggcataagaatttaaacatcactaaagttgtcgaaaatggtatcgattatgatatcgggctcgacatcggcacgggttcggttggttgggctgtcgtaagtgaacacggagttttacttaagcgccttggtaaaaatgcctggggctcccgtttgtttgaatcggctgaaaccgccgccgacacgcgctcgaaacgcaccttaaggcgccgctatgatcgacgcaagcaacgcatttacaacctgcgcgaactcattgctgccgatgttgcacaggttgaccctcatttctttgcgaagttcaatcaaacgccccttattgaggctgatagaggtctttctgatcggcatattctttttaacgatatcgattatcagcagctattcttagttgaccctgaacacaacattcacgaaaaaaagtaccccactatttaccacctgcgcaagcgtcttgttgaagatccctgcaaagaagatatccgcctggtgtatctagcccttcatcatcttgttaaataccgcggcaacttccttatcgaaggagatttaacagctgaaaatgccaatgctttgcaggcgcttgaagcttttaaagaggcactcattcctttctgtgaggcacttgaaatttctttcgatgaaactctttttgatgttgctgctcttaaccaagtcttcactgacggctccaaaacacgccgtgaacgccaagaagcggtaaatgaattccttctgccttgctttgaaaaagagtcgaaagatagagttaaaaacctttcgcttgctatgtttggctatcaaactacctgggataaaatatttccctttgaatctgaaacagctcaaaagttctcactcgataaagaagataaagtaaccgcctttgtcgatgaggtccttcctgaagattttgctgatgtctttactgcgcttgaggggctctacaacgcttatcttcttgccggcattttgaagggttctcagggtggtacgctttcgtcgtctatggtgggtttataccagcagcacaaaactgatcttcatatgctgcgtaacatagttaagaagtacagcactattgaggaggaaacgggtaggcgtattgaattcaacaatatgttccgcggccctcggtacgctgatggtatgtatgtcaaaaacgcagctaaaggctatacaggctacatgatgaataaagtctcccaagaagatttttacaaggaggtcaaaaatcttctttcgggcttcacccttacaagtgaggaggcgaagtggtgggaagaggcccaaaagcgcattgatgatttaactttcttgcgcaagctccgtaaccgcgataacggagctattcctcatcagctgcaccttgaagaaatgagagctatcttaaaaaatcaaggccagtattatccaactcttgcccaaaacgcttcatatattgagcaaatactttcattccgtatcccttattttgtagggccacttggtaaagaaaagaaccctcagcgtgaaaaggccttcgggtgggcaaagcgccgccctggtttcgagagcaccgaaatcaaaccctggaacatcgaagaggtcgttgatttcgatcaagctgctgaagatttcatcacgaatctcacgggggaatgcacctattattacggcaagtcagttattcctaaagcatctcttttatattccgaattctgtgttcgccaagaattaaataaatgcaaagtagcggccgatggtgaaaaggaaacccttatggatatcgaaaccattgagggtatttatcaaaatgtgttcaagcgctactcaaaggttaaggttgatacggttcgcgaatatctcaaatcaaccggttttattaatacgggcttcaagggcactcagaaagaaggagaatttgcctcaagcatgaagtcatactgcgattttaggcgcattcttggtcgcgacttcgattcgtatgaagattacgaaatggttgaacaactcattctttgggttacggtttttgagaataaaaagatccttaagcgaaaaattaatcagacctacgggcctgaagggttgcaggttctcacagccgatcaagtgaataaaattagcaaactgcgttatacggggtggtcaaacctttcgcgtgaatttttaaccgagctcaaggtggattacaacggtcgcaagctttccattatgggtgctttgcgtggaggtactggcaggccgcttaatcttatggaggtgctaaaaaaagattacctcggtttcgatgagctgcttgaagaagtaaatgcggaataccttaaggcgcacaaaggcttcatgcttgatgaaattcctggctctcccgctatcaagcgaggcataaaccaggccttgggtatcgtggacgaaattattaaacttgccggtaagccgcctcgtcgcattgtggtggaaatggctcgcgaagaagtaggtcaaggtaaagggaagcgcacaaattcacgcttgaagcaactcgaagagctttacaagaaccttcaaaacgatattttgctgcaagatagtaaagagctgaagggtgagcttaaagaatacggtgaccggctcgacgacgaccgcctattcttgtacttcctgcagcgtggtaagtgtatgtattgcggcgaatccttaaaggtcgaaaatttaagctcatatgatattgatcatatcgtgccgcaatcaatgataaaagacgattcgcttaacaaccgcgttctggtgcatagtgaatgtaaccgtcacaaggccgatatctacccgcttcctgccgatttaaggagcaaaaacgcatctcgctggaaactccttaaagaaggcggccttgtcacaacaaagaagtacaacaacctcatgcaaattaacgatacgcgccaacttaatgcgatggctaagggctttattaaccgccagctcgttgaaacgcgtcaaataactaagcatgttgtcaccttactacaatcgcttcatgaggacactacggtagaaacagttaaggctgagcttacgcatcgcttgcgtgaagcttatgatttaccaaaggtgcgtgaagtgaacgattggcatcatgctcacgatgcttatcttgcgtgccaagtgagccgctttattcacgagcgctttactggtatggcagaagatcttgattatgattctttcagtaggtatgcctatgtggttaaaggtgcccagcaaagtaacagcggcttagtggtggggtcttttggtcgcgcaaggcttggtgaatacgaagacgcgtggaacggcccagcggaagtcgaaagaattcagcaggctctcaacttcaaggattgcttcgtctctaagaaactcgagaggttgaagggtgagttctggaaccagacggtgtattcgcctagaactcattctgataaagctcttcctttaaagcaggggaaggatcctgatacttacgggtactacatgagccctaattctgcctattatgccttggttgaatatagcgacacttcaaagaagaagcccaaaacaaaacgtgaaatggtgggtgttcctatcgatatttcttatcgtattgataatggtcatgacctgttaacgcttcaagcttatgtggaagccatatttgggggagaggttcagattttacgcgcccctatctataagtaccaaaagatagagtggaatggcggtttttattatttggtttctaattctgagatgattaatgcgcggcagctgtggcttcctcatgtgtatgttgattatcttgccctggctcaagcagcattaagccccgctgctcgctatgccgacaagcgcgactttgaagaatggcctgaaaaagatgagctaagtgaagaaatttttaactatctcagcgagcaaattaataattactacccacgttatggtggcttgtacgacaaactcacttcagaaaaggctgtgagcgcgttcgaaagcaaatcccccgaagataaatgcaaggcacttattgagattctgaatatgctgcattgtaatgcgaggactggtttagcaagtttgggtctttcagggggtgcgggacgaatgaacatgcttaatttgtcggatcctactatcgtcttcatcgacacctctattacaggcatgtacgagtcatcggcgagctacgaggcatag

SEQ ID NO: 210 - DNA, 4254 bp, unidentified
  misc_feature 1..4254: note = Synthetic sequence or unknown origin
  source 1..4254: mol_type = other DNA
atgaaacataaatatataataggtatagaccctggtgttggttctttgggtatatcattgaggaatacagaaaggaatgctttattagaacaaatagaagttacgaacgtggatatagttcgttcgggtgtggttaagaatggtgaaggaaaatatgtttcttttgcagcagaacgtagaggctttcgtaacacacgtactttgtataggcatcgcaaaagaagaaagcaagaaacactgaaattgttgataaatgaagatgttgttcttgacgagaacattaagcatgtgttatgtcctctctcgaaagaagaacttgacaaatgggtacgatacgataataataaaggttacaaacgtgaatatccaaccgattccgttgaattttcccattggatgatgcttgattttaataatgatggcaaggttgatgattattcgagtccatttcaaatacgtaaggagttagtggagcgtcaattcgatttttcccaaaaagaagattgctacaagttaggacgtgcattatatcatatagctcaacgcagaggtttcaaaagcagcaagggtagcattaatgacagtgatgtgatttctttaggcgataatcaagatgacgactttgattcattggaatattctgagaagaaaaagtcgaaaacgcttactgcctatatgaatcaacttcaagaaaaaggtcatgagcgggtaactgtaggctttgcactggcttgtttggaaaatgatggcgttcgtttgagggatagtgaatatcaagctatacgaacgcaattgaaagaagaaatcaccaccattttcaagtttcaaaaacagttatccttgaattctactctctacaaacgtcttgtcagtgagaaaaagaatgatggaaccatcttttatcaatgccccatcaaatctcaaaagggaaatgtggaaagttgtacgttggaacctcgcaagaaaagatgtcaagtcagtcatcctgaatttgaaaagtatcgtgcgtggagctttattaacaatatcagaataaaacttcttgcagatagtgaaccacagatgctaccttatgagttacggatgaaattgtttgacaaaataacaggcacagtatcaaaaacgattgatttcataggtatccgtaaattgattgagaaagaagtgggggagcctctttccgcaaatgaaggaactatcaatttcaaagatgattattcattaagtggttgcccaacaattgggagactaagaaagattcttggtgacgattgggaaacaaagacaatagaaatcgagcagacacgccgaaggaacaagaaccaagaagtcaaagaccttcacactatttcttatggtgcaatagatttgtggcacatttgcacaacgatggaaaacgaaacggcaatgacggcttttttggagaagaaaatgccatttgatgaagagcagaacaaagaaatgatgcgattatacaagaatgtatccaatgattatgccaattattctgtgtatgctttgcaaaaaatcaatcgttttcttattagtggatgcaataactatgaagcaactttattagcgaaaataccagacatcatagggaaaacgcaatggaaacagtatggaaaggatatagagacggacatacaaaatctcattgctcagaatcgagaagaaaaaagatatttggcgatagcgaatcaattgatagcagattataagtctcaagatgaagatgatagagatcataattatgaataccaattgacggaattggattggcgcgatgtggaaaacaaaattaaggaatccattggtaaagtgacatggacgaatattcctacagaagaacagaacgccatcaagttgcgtgtgggagaactatatcagcaatttttcaaaagctataagcgggattattataaattgccgaatgataccgaaagaatccaaagctatttgtctgaaagaatctcactcaatttgcaaaaggttcagcaaatctatactccttcttctaacaagtattatccaccagcacatcgagtgaaaggtgttttccaattaggctcgcctgcaaagattgctcttcgcaatccttctgctatgcgtattttgtatttacttcgtcgtcgtatcaatgaattgatgacgagatatcgtgatatggagcctgataatacgcgcattgtagttgagttgccacgcgaattgaacgatgcaaatatgcgtcgtgctatagaattatatcaggagaggcggaaaaaggaaaacaacatattcaagaatatggtaggcgaagtcttagatgaaaaagaagaggagagagtggagaaaactcgtcttttgatagaacaagccccagaatatctaaatgctgattttgatgaaaggtatcaaaaacataaagaggtgaattcatataatcgcaattcgtataatgatacaatagaatatgctactacgaagtatcgtttatggttagaacaaggatgcattgacatatatacgggacacacaattcctttttctcatttgtttgatgccaacatgtatgatattgaacatacaattccacgtagtatagttttggaagatagccttgaaaacaagaccataaccagtgcttttttcaatcaaaaggtgaaaggtactttgcttccgtctcaactgccaaattataatgatgtgattgtaccgaatttgcaaccgtggaaagaacgagtggaacgacttgatgaacgagtgaggtattggcttagagaaacaaagcgtgcagccgactccgaccgcaagaactattgtattgtgcaaaggcacttatggcaaatggaacttaactattggagttctaaactcaacagatttttaatgacagaagtgaaaacagattttgttaacaagcaaatgtccgacactcgtgtcatttctaagtatgtgtatcattatctgaagagttgtttcagtagcgtggacgtgcaatatggttgtacaaacgctgttttcagaaagattttgggcattcaagctaaagatgaagagaaagacagaagtgttcatactcaccatgccattgatgcaactgtgctgacatttattccgtcttcttctaaacgctgtgaaatgatgagacttttcttccaaatagacgaggcaaagaaggctggcaacatcatggaagagaagcgactcaaaaagcaattggaagaagagaagaatctttgtttgtatggaagaactaacaagaaacattcagacaaaaaccttgcgaatttggtaagggacattcaagaaaccacatttgtcaaccattcagaaagagaccaggcgcttactcctgctaaaagaagaggcgtgtttagaaaaaatggaacaacctataatgttctgaaaacaggagattgtataagaggaaagttgcataaagaaaaattcttcggagccattacgcaatgggagaaagatgctgatggtcttgttgttagagatgctatgggacaacatgtcgtcgatacctctaacgtaaaatatgttattagagttaaactccaatacaaacaaggaagaggggaaggatttaagagttgggaggagttgaaagcaagaatgattgataaatctctttatcgcaaattagaagaacaacatcccaatgagactttcgtagaagcttgtaaaaatggattttttacaatgagaaagattcatggagagtttgtaaggaataggattcgtcatgtgcgttgtgaaatctctgacaaccaaggtcacatttcgataaaacaacatctcaatcgttcaaagaaagattacaaaagattttattatgctgctcctgcggatttgctatgtgcttgtgaatataggggggtaaaagagcagaagtatgagatgatgcgtttatttgacatttcgcaaaatagaaaggacggaaaggaagatataccaacatctttacaagggaaaaaggaaatcctccatcttgttcgtgttattcgaatgggggatatggtaatattgtataaagattctccaaatgagctggatggtttagataaaaagcaattatcaaaacgtttgtatagagttgatgggtttgaaaaatctggtagaattatattagtcaagcacgataaaaccaaagaagatggtaaaggaaagtcctgttctgatttcgaagacagaatctcacaaaacatcattcgaatgtcaattactaaagttaaatttgttcctctcataaatcacagatag

SEQ ID NO: 211 - DNA, 4263 bp, unidentified
  misc_feature 1..4263: note = Synthetic sequence or unknown origin
  source 1..4263: mol_type = other DNA
atgtctaactataacaatttcaagaaatatggcgattactatattggtttagatgtgggtaccggttcatgtggatgggctgttacagatacgtcatataacatcttgaaagtgtcaggtaaaagtttatggggcgtaagactatttcctacagcagatacagccgcagaaagaagatctcatagatgcgcaagaagaagagtattcagaaaccgccaaagattaaatttattagagcagttatttgattctgaaatttctaaagttgatgtcggtttctttcaaagattaaagaatagcgagtttaaagagatttctaaaaataatctttttggagattgcacttataatgacaaagatttctttaaagagtatccaactatatatcacttaagatataagttaatgaatgagccaattgatgatataagacttctctttttagcggttcatcacatcattaagcatagaggacatttcttattcgataatgtaaataacataggagcttctctacctgagttgtgggaacaatgttgttctcagtttgtggatatttctcttttttcaaatttgtctgaagattatctagatattgcagaatctttaaaacagaacctaattgacatgagagacgatgttatcaatgtaataaagacatcatccgataagaaggctgatctaaataaagtctttgcacaacttaaatctgtatatgacgaaatatcagattatgaagtaaagaaaacaatagagaacagggttaataaatggtccttattgttattgggatataaagtaagtgctgttgaaattttttctattgatgagtcagatgaagaaggaatctcatgcaaaatacaaattaattcttctgattatgatgagcaattactaaaaattaaagatgagtttaaaggagtagttgaatctgaaaaagctgtttacgatgtaatcaagttacaagaaattctaaaaggctgtaagagcatctcagaggcaaaagtaaaactatataacaaacatgctgaagagctaagaatctttaaaaatttgctaagagaaagactttctgagaaaattttgattgaagttaataaaaacgtaaaagtagctaacaatgaaaagttaacctcagatccaaaatccttttacaaagagatttttgaggaaagaaataaaaatacagaaaagggaaagatctgtttttactatgacatcacgcacggtgataaatctgcaaataaagaagctataaaaggctcttcaatctacaaaagactacagattttagctcaaatcctactttgttcttctaaaatctataaattaagtgaaaaagaaaaagttcttttgcacaggattggcgatttatctatttttgaaacacaagtttctgcggataattcagtgattccctatcaaattaatttagctgaactagataagattcttaaagtacaaagtaaaaactttgcttttttatcagaaaaagatgatgcaggagtgttagtatatgacaaaataaaagctttgctaacattcagaattccatattacgtgggacctttaaataatcattcaaagttctcgtggatagttaagaaatctcaagaaaaaatagtcccttggaattttgaaagcgttgtagatacagaaaagagtgctgaagcttttattaaacgaatgacttctaaatgcacatatctcagcggagaggatgttcttcctaagaattctattatttactctaaattcatggttttgaatgttctaaataacatcagaataaatggaatgaggttagacgaagctcaaacaggactaactaaaaaggtatttgacgaactttattgcaatcaaattaatgttactcaaaaacagcttgttgcatacctatacaataatggttttttaacaagtaaagaagaacttacaggattcgatgatgagcaaaaggtatcaatgtcttcttacgtcaaaattaagaatgcattagggactgataattttgatataaattttgctgagtcttttattaaatattcaactctattcccaaatgattatttaatgattgagaaaagattgaaaagagagttttcttctgaatgtgctaagttcaatgaaaaattgtcgaaattgtgtcgcattaagttttctggatggggaagactttctgaaaagttacttataggtctgataggttataataaaaattctgaatttgataaaaactcaatattaggtttcatgctcaatggtaaaggaaatctaatggagcttttaagttcagaatacactttctctgatttgatctcttcagaaaattcaactttagatgaaaataatgctttttcataccagaaccttgtagaaggtctatatgtatctccatccgtaaagagaatgatttggcaaactcttctagtcgttagagaaataactaagaaaattatgggctatgaaccttcaaggatctttgtagaaatggcaaggggggctacagcagatcaaaaaggaaagagaactaattctagaaaaaagtctatcttagctctttatgataagtgcagacaagattttgatatcagtgatttatctagtaaattagagaatgaaaaagacagtaaattattgagtgacaaaatctatctttactacactcagctaggaaagagtgtgtacacaggaaaggagataaagattgatgagtttgacttgtatgacatcgaccatattattccacaatctctgactaaggatgacagcttagataatagagttcttgttgagaaagaaatcaatcagaatgataaaaaaaatagatatcctttatcttctgaaattcaagaaaatcaaaaacagttttggaaacacttgttagatttaggtttgatctctaagtcaaagtttgaaagactgattagaagtaaaccactctcaaattcagaaaaagagggattcatagctagacaattagtggagacccgacaatcgactaaggcaattgcaggcttactatctaaactctacaagacagctaaaataatctatcctaaagcaggattaactgcagattttaagcaaaggtttgatctaataaaagttagagagttaaacgatcttcatcatgctaaagatgcttactgtaacatcgtagtaggcaatgtttattatgaaaaatttacaagtaattacttgtacgttattgaaaataatgaaccgtattctttcagcactagtgacaaatcatatattttcacaaagcagaatgaaaaaagacttcgggaaacaggaacatgggattctagaaatggaaaatctataagcatagtaaaaaagtattataagcgtaataacattttaatgacttataagcaagaagagcgaataggtgccttatttaatcaaactttatatggaccagagaaaggtactatacctaaaaagaaaaatatgagttgccaagattatggtggttatgacagcgatcaaaattcatttttctcttttatctcatacaaagatgataaagcaaatttaaaaactaaacttattggtatccctctgcgtgtagtttatggattgtcagataaagcttcagcaatttctcattatttacttacagaaaaagccaatgaatatagagagcctaaagtccttatagatttcttaccttttaatttcatattaaaagataatgaaactggatttttggcaagagtagtgtcttttgcttctaaaggaaaacagcttgaaatcaaacaatttaatccccttgttttggatgaaaaaaatctaaaaccattaaaagcaattgaaaagtttgtttcacgtcttaagaataaatcaattaaaataaaatatgaaaaagacaagagtggtttcactgatgaagatctgtcatcaatttattctgagctaaaagataaatcgaaaaattcagtgtttaaaaatcttccaaagcctatagttaaaatgttgagtgatgttgatataaacaactataagtatcaagaaagcgaaaaatctgaaccaaaactattgactattgaacaaaaggctgttgctatatgtgagcttataaaagctttccatacagaatcaagtaatttactttttcttggtgaaaaaaaaggctcaggcgtaaagagaatcaaaacagtattagatctagaaaaaactgattattcgatactgtgttcatcaataacaggcttctatgaaaaagaaataagattgagagatcttctaaaatga

SEQ ID NO: 212 - DNA, 4410 bp, unidentified
  misc_feature 1..4410: note = Synthetic sequence or unknown origin
  source 1..4410: mol_type = other DNA
atgaaaaacattttaggcctcgatttaggcacaaacagtatcggctgggctctcattcagaccgatgatgaggggaaaacataccaacgtgatattaaattaggaagccgtatcatcccgatgacccaggatgttcttggagccttcgaaggtggagccccaatccagacccagacggcatcacgtacacagaagcgaggaatgcgtcgtctgtatgaacgtcgcgccttgcgtcgtgagcgtctgctccgtgtgctgcacatccttggtttccttcccgaccattatgatcattccatcggttgggatccgcgacagacaaagaccttcggcaaattcatcaaccccgatgaagaaccgaagctcgcttggatgcgtgatgcccaaggcaagccgtcgttcctgttcaagagttccttcgaagagatgttggccgatttcaaggcaaaacagcccgaaatggtggccaatgacaaaaagattccttacgactggacactttattacttgcgtcagaaggcattgctccaacccatcaccaaggaggaactggcatggatactgctcaatttcaaccaaaagcgcggctattatcagttgcgcggcaaggacgaaatcagccaggacgaagacaagagcaagattgtcgaatatatcgaacaagtggtaaccgatgtcgatttcgaccccaatgaaaaggaatccagcaagggccgatggtacaatgtccacttggccaatggtatgatttatcgtcgacagagtcagatcagcctgaaggactggattggcaagaaacgcgaatttatcgtcacaaccgaactcgatgaccatggcaagcctaaactcaacaaggatggcgggatcaaacgttccttccgcgctcccgaagccaacgactggacactccgcaaggtgcgcaccgagaacaacgtggagcaaagcggcatgaccatcggagcttacatctaccagcacctgctcactgacccatcaggcaagataataggcaagttcgtcgagaccatcgaccgccatttctacaaggatgagctcacggcaattctgaagaagcagtcagagttttatcccgaactgaaggatcaggccatgctcgatgcatgcagtaaagccctatacggccacaacagcgcacgccaattcagcctcaagcagaaggatatggcctatctgctcatcgaagatgtcctcttctaccagcggccactcaagagcaagaagtccctgatatccaactgccccttcgaatcgcacacctacgtcgataaggagacgggcgaggtgaagaaagagtatatcaagtgcattgccaaaagcaacccttacttccaggagtaccgcatccgccactttatgcagaatctgaagatttacgacactagcggactcgaggagaaggatgtgacagagcaatatctgcccgacgcagaagcatggaaacgcctttacaattggctcaacgagcgggattccgtcaaccaggactccttcctcaaggacttcttggctatcaagaagccgaagggcaaggatgcaaagtacctgcttcgctggaactatgtggaggacaaggataagaagtatcctgtcggcgaaacacatgccttgctcaagagttgtctagagaaggcaggtgcagccacaagcttgcttaacgacttcgctgttgagtatcgtctgtggcacctgttgtattctatcgatgacgtaaacgagctcaagggtgcgcttcgcaagtttgcctcctgttaccggattagcgacatcgactcgtttgttgaagttttcagcaaggcaaaacctttcgacaaggattatggcagttattcggagaaagccatcaaaaagttgctgactctgatgcgtcagggaattcgttccgagcaggcttgcgaacaattatacgagaagaaaccggctgaacaatggacctcaccaagtgacatccatgccttcattacggacttccagcagcattcgctgcgcaacccgattgtggagcaatgtatcctcgaaacgcttcgtacagtggccgacatttggcagcaatgcggacatatcgacgagatacacctcgagctgggacgagagatgaagaatcccgccgacaaacgccaacagattagcaatcggaatcgtgaaaacgagaatacaaaccttcgcatcagggcgctgctgaccgaattgcttaacgattcgaacattcaggatgtccgtcctaatagtccaatgcagcaggatatcctgcgcatctacgaagagggagcactcacggaactcaagccatccgaccccgagtataaggaaatacaggaaatctccagactggcccaaccctcggtaagccagttgactcgctacaagctttggctagagcagcgctatcgttcgccctacacgggtcgtgtaattcctcttgctcgactattcactcctgcctatcagattgagcacgtcatccctcgtgcgcgctattacgatgattctctcaacaacaaggtgatctgcgaggctgaggtcaacaaggacaagactaatctcctggctcatgagtatatttgccagaatggtggcaaattgattaccacgacaagcggtactgtcaaggtgttcaacaaggaggaatatgagcagttcgtgcaggaccactatgcgatactcaaaaccaaaaagcgcaacttgctgctcgatgacattcccgaagaattcatccagcgacagatgaacgacagccgctacatcagccgatacgtcaaggcattactctccaacatcgtgcgtgccgacgaaaacgatgacctcgagacttcaaagaacgtcatcgtctgcacaggctccgtcaccgacagactgaagaaggactggggcttggtcgatgtttggaatcagttgatttacccacgtttcgaacgactcaataatctgacaggcactaacctcttcggacaatgggtaaacaaggacggaaaacgatatttccagaccgatatgccactggcactgcgcaaaggcttttccaagaagcgcatcgaccacaggcaccacgccatggatgcacttgtcatcgcatgcgccacacgcagcatcgtcaatctgctctccaatatgaatgccaacaagaccgagcagcgcgaagacctgaaacgaaccctgactggcaaaggcggtttgttcaacaagccttggcccacattcacccaagatgccttccaggcattgtcggaggtggttatcagcttcaagaacaaagtgcgcgtcctttcacgtgcttccaactactatgagcactacgatgcagaaggccgcaagcggcaggtcgcccaaaagggaggcaagcagtttgtggtgcgcaagccgctccataaagatcatatgtacgctcatatcaaccttcgccgaaagaagtctgtctcaatcgatgctgctcttcaggaagttagaaatattgtcgataccaaattacgcaatcgtattgtcgatctgtttagtcaaggtcttgacaagaagaagatcaagaaacaactagcagaagaaggagttggtaagcaaatcgaaatttattttttcaccgacgatgtcgagccattggtagctataagaaacaagttggataaatcttttgacaagaagaaaattctgtcgattaccgacactggcatccagaagatacttcttgcctatcttgcctcgaagggcgataatcctggcgaagccttctcccccgaaggcatagcagaacttaacgaacatattgccgagttcaatggtggacgaaggcatcaaccaattttaaacgttcgagttactgaaaaaatgggcgaaaagttccaggtaggtgagactggaagcaaatcccgcaaatatgcagaggctcaaagtggcacaaatctgttcttcgctatctacgaatcggaaggaggaaagcgcacctatgccaccattccgctgaatatcgctgttgagcgaatcaagcaagggttgggacctgttcctgagaaggatgaaatcggttgtacactcaagttcttcctatctcccaacgacttggtttatgtgcctacggaagatgagatgttacataaaaatatagaaattgaatccttagataaggaaagaatatacaaattcatcgattcaagtgtaaccactgctaactttgtaccacacagatcagcttctttattgtatgcgttgccaaaggatgaagcagttagtttttgcaaaactgataaaatcgtacaaaatgaatatggcattggtagtccgcaatctaagaatcagaagagtattagcaacggtaaaaacacagctgacatttatataatcaaatccgtttgctggaaacttgaagtcaacagattgggacaaataacaaagataatccgctaa

SEQ ID NO: 213 - DNA, 4452 bp, unidentified
  misc_feature 1..4452: note = Synthetic sequence or unknown origin
  source 1..4452: mol_type = other DNA
atgaaaaacattttaggacttgacctgggaaccaatagtatcggttgggctttcgtatctacaaatgacgaagggaatactatacaaaacttaaaattaggtagcagaataataccaatgagccaagatgtactgagtaattttgacagtggtgttaccaaatcacaaacagcagagagaactggttatcgtggaaccagacgtttacgtgagagatgcctgcttcgaagagagcgtttgctacgtgtactccatattcttggatttctccctaaacactttgacaattctatcggctggaacaaagatgataataagtcttatgggaaattcatagatgacagtgaaccgaaaattgcatggagtaaaaatgcagaaggcaaaatgcaaattgtgtttactgaagccttcaatgaaatgttagacgatttcaagagccacaatcctaatcttataaatggcggtcacaaagttccgtatgattggactatttattatctacgcgacaaagctttacgcaagcccatcagcaaacaggaactcgcatggattcttttaaatttcaatcagaagcgtggttattatcagttacgcggagaggaagaatatgaagaagaaaatgaacaaagcaaacttaaaaaaatagagtatcacgaactgaaagttgacagagtcgagactacagaggaacgacgcggtgacgatatatggtacaatatttatttggaaaacgggtggatatatcgacgtccaagtcgtattccacttgacgattggacaggtaagaaaaaggaatttatagttaccacagaatacaatgaggatggaagtattaaattagataaagagggcaacgagcgtcgttcattccgtgcgcccaaagaagatgattggggattacaaaagaaaaaaactgaatcacaacttgacagttctaatcagactgttggaagctatatttaccatcatttactatacaatccgaaggataaaatcaggggtaaatatgttcgaactattgaaagggcatactataaacaagaactaaaagaaatcctgaaaaaacaatccgaattcattacagaactcacgaattcgactttactcgaacaatgtatatgtgagttatattcaacgaacaaggcacatcaggaaagcttaagaaaaaaagacatatcttacttattagttgacgatcttttgttctatcagcgccctcttaaaagcaaaaaatctttgatttctgattgtccttttgaacaatatgaatatgctgataagacaactggagagataaaagttcaacatattaagtgtgttgccaaatctaatccttattatcaagaattccgtttgtggcaatttatccagaatctgcgtttgtatagtaatagtgtcgaagaacaagaagttacaaacgattatctcaaaacagaagaagattatgtacacctttttaaatacctgaatgacaaaaaggtaatttcgcaggaaaggcttctgaaagacttctttggtttaaataaaccaagaggcaaagacacggtattccctatacgttggaactatattgcagataaaacatatccatgcaatgagacacgaagcaaaatgctatcagctctggacaaagcaaatatttcgacagacattctgaatgacaaatatacagaataccgtctatggcatttgttatattccgttgaagatattaatgaaataactggagcattaaccacctttgcagaacaatacgacttgccagtcggtttcgtagatgctttcaaaaagatttcgttcaagaaggaatatggagcatattcagaaaaggctgttaagaaacttctatcagttatgcgaatgggaagtatgtggtctgcagatgcaattcctgacaatatacagaaaatcatcaatggttcaattgacgagaaagttaaagaaagaatgagtcatcaaaacattattcttgatgacatcagcaaattcaaaggcttacccgtttggttggcttgttatgccatatatggtcgtcacagcgaatcaaaagatattaccaaatgggataccccccaagatcttgcaaactttataaaaaatttcaagcaacactccatgcgcaatccaatcgtagaacaatgcatacttgaaactctacgcactgtatatgatatttgggttaaatatggacatatagatgaaatacatgtggaattgggtcggagcatgaagagtactgcagaccaacgcaaacggatgacagatacaaatactaagaacgaaaacaccaatctacgtatcaaagcattgcttatggaacttaagaacgatccgacaatatcggatgtgcgtcctcaatcacccatgcagcaagatattctaaaactatatgaagaaggagcactactaaatcttgataagaatgacatcgatttcaaagaaatatcaagcatttcacaaaaatcatcgccaacacaaagtgaactgacaaaatacaaactatggcttgaacagaaataccactctccatacacaggcaaagccatctcactgagcaaattgttttctcctgcatatcaaatagagcacgttatacctcagggacgttactttgacgactcatttaccaataaagtaatatgtgaagcagaagtaaatcaacggaaatccaatatgcttggcatggagtttataaaaaagtgcggtggagaaataatccattgcccgaccattggtgacgtaaaagtgttgacaacagatgaatataaggcatttatagctgaccattatgcgagcaatcctatcaaagctaagaaattgatgatggacgacattccagaagagtttattcagcgccaaatgaacgatagccgttatataagtaaggtcatcaaaggattgctttcaaatgtagttagagaagaggatgaagtggatgccatttcaaaaaatgtaattccatgtactggtggcatcacagatcgtttgaaagatgactggggattaaaacatgtatggaacagtattgtttacccacgcttcgagcgcatgaaccgtctcacaaattccgaggatttcggacactgggaaaacaaagatggcaagcgagtattccaaacaaaagtaccatttgaattatccaaaggttttagtaaaaaacgtattgaccatcgccatcatgcaatggatgcactcgtcatcgcattagcaacacgaaatatagtaagctatctaaacaacgaatctgcacgcgacactaaacgcagagagaaccttcgtcagcttctttgtgacaagaatcgtattattcgaaaaccatggccaacatttacccaagatgtgtatgaagcattacaaaacattgtggttagtttcaaaaattatgttcgtgtcataaacaaggcaagcaactattatgaacactatgacgaaaacggagtaaagacaaccatatctcagaatagttcagaacaatgggcaatacgcaaaccgatgcataaagaaacggtcttcggattggttaatctccaaagaaaaaaagaagttccattcaacaaagcaatagagcgaatttcatctattgttgacaaagaacttcgctcgacaattagagcgatgataacagcaggaatggatgtgaacaaaataaaaaaatactttaaggatcaaaattaccaatttgcaggcaagccagttagcaaggttttagtctattattatacagatgagaatgaaaggatggttgcaacacgcaaaccacttgatgacagtttcgacgaaaagaaaattcatagtattaccgatactggcatccagaagatacttttgaattatctcgcatccaaaggaaatgatccaaaacttgctttttcacctgaaggtatcatggaaatgaacgaacacataactgactataattccggaaagaaccatcaacccatagtccgtgtacgacttgcagaaccgaaaggcgaaaaatacaatattggcacaacaaagaataaaaataaaaagttcgttgaagctcaaagtggcacaaacctattttttgcaatctacgaaaaagaagatggtactcgttcattccaaaccattcctttaaaccaagttgtagaacgaatgaagatggggtggacaccagcaccagaacaaaacgaaaatggcgacaaactcaaattctatctctctcctaacgatctcgtttatgttccttctgaagaagagcgaatgtccgactcagaattaataaacagagagcgtatatacaagatggtatcagcaacaggaggaagagcattttttattccagtgactgttgcatctgttatagcaaatggcattgaatttcaatctacaaataaaattgaaaatataaacaatgtttccatcaaatctatatgttggaaacttgaagttgatcgtcttggaaacattacaaagattgttcgatga

SEQ ID NO: 214 - DNA, 4455 bp, unidentified
  misc_feature 1..4455: note = Synthetic sequence or unknown origin
  source 1..4455: mol_type = other DNA
atgacaaatatccgcaacgctgagcattacaacatcggcctcgatatgggaacaggttctgtgggctgggcggttacggatcaggatggaaatctctatcgattcaagggcaagccgacatggggaagcagactcttcacgtccgctgaacctgctgctacagcgcggacatatcgtggacagcgtcgccgctatgataggcgccggcagcgactcaatctgctgcagcagatatttcagccagagatggaaaagaccgatcctgacttcttcgttcgtcttaaccagtcacggctctggaaagacgatccgcagcgatttggtgagtatacctggccgctcttcaacaagaagcacccactcataatcgatggaaaggaaatcacggaacctgtctactatggtatgttccccacaatctaccacctgcggttctggctcatgcagcagacgaatcaagtcgatatacgtctcatttaccttgctttccacaacatcgtgaagacgcgtggcaacttcctctatcaagatatgggtacagcactaacggcgaagaatgccgatatcagcaagtctatcgatgagtttgctgtcgctttcgaggactggcaggggtctctcgatgaggaatcgcctctgaaaggtgctgttgtcgacacggacgttcttgaagccgcattgaatgatacacagacaagacgcgctgagaaggaagaggttgcagcaaaagccttctcaaccgatagttccgataagaagaagatggggaaagcttttgccgatgcattcattggctataaagcgaatttgacttatatctttgatatcaaggaagataacaaggacatcaagttgagcttcggggatgaagagaaggtagatgcggccaaggagctcttgggcgatgaagacaagttgcttttcgaagcgatgaatgcaatttattcctcagtggtgctgcagggcatacttcatatcactaatgctgaagtgtattgggcatcgggaatcttcaagacggcgcttgcgggaatggatatagatgattgcgcggtcactatttcgaaaagcaagattatcgaatatggacggtatcgagaagatctcaaatgcctaaaacagctggttaagaagtattatccgaatgacgaagagacaggcaagaattcttctgagtacaagacattcttcaaaggcaaagaattctgcgatccaaagtccaaggtgcctgtcaagggacataagcatcgtcacatgaagtatgatccggctactgctgaaggctatacaagatatgacctgggtgctaaaggcggtactgatattcgcacaaagagtggtgtcacgccatatgagcaattcaagaaagatacattgagcatcttcagggtgaagtatgccaacggcaaactgcggccattagatgaatccgcgattgcactgaaagctgctgcggacgaaagcattctcgagattgccaagaggttcgaagaccagaccttcatgcgaaagctcaagacaagcgataacggagtcattccatatcagcttcatctcgaagagatgacagcaattatcgaagtgcagaaggcctcctatccattcctggccgaggtctatacgacgcatgatggtgcggtgcgcaataagattaaatcgctggtcagcttcaggattccctactatgttgggccgctcacgcagaaatctgcagcaaaagatgccgagggcaggaaccgctttgcgtggtcggtgcggcaggctggcaaagagtccgccaaagtgtatccctggaactgggatgatgtaatcgacaaggaggcaagcgccgatgcattcatgcatcgcatgatcggctccgatacctatctctggaacgagccggtgcttccacgctgctctctactctacgagaagtactgcgtcttgaatgagctcaatggtgcacattacaaggatacggatggcaatattcgacgtctggatgtctctgagcgtaagcagatatttgaggacctattcatacatggtaagcatgcttcagtctcttatagggatgttgaggactgggcaaaacgccattgcaggagatatgccgaactgtccggaggacaggaggagaacggctttgagtcgaagcttggaagctatcgctatttctgcagactgctcggcacaacggatctgaatgactctcagcgcgagatggctgaggatatcatcgagtggaataccttgttcgaagatcgcgacatactgcgtgcaaggattaaggaggcttatagcaatttccttagcgataagcagataaaggatgtctgcaagaagaggttcactggctggggaaatttgtcgaagaaacttctcactggcatcaaggtaaagagcgacgaaggtcccgtttcagtcatggatgtcctggaatacggatatcctaatgcaggttgctctgcatttaggcatggggacgcaatggtattgatgcaggttctgcataacgagacgctagatttcgaggagaagatcaatgaaatcaatgaagagtcgggcgaaggccgtctgctgacggtagacgatcttccttatgcttcaccggcgcttcgcagaagcatcaaccagacaatgcggattgtcgaagagattgtctcgattgccggctgcgccccggaaaatatctatatcgaatcgacgcgtgatgaagacgagctaaccaagaaaggcaggacgaagaaacgatttgaatctctgaatgctcagctcaagtgcctcaatggcgaacagctcaaggccggtatcatgaacgagctgaaagagaacgagagcaagctcgatagcgatcgcctaatgctctatttcatgcagaacgggaagagcatgtattcaggagcagatcttgatatcagaaacctgtcctcttatcagattgaccacattattccccagagctacatcaaggacgatagcttggacaatcgtgttctggtgaaagcggacgagaatcagcgcaagaaggattctcttctcctcgatgagagcatcaggaagaggatgaagcctgtctgggatgcactccataatgctcatctgatgagtgataagaaatatagcaatctctgctgtgacagcatttccgagcgtcgcatgcaggggttcatcagccgccagcttgtggagacgagccaggtagtcaagtttgccgcacagatgcttgcacagcgttacccgcagaattccgatgggacgggaacgcgggtttgtactgtcaaggctggcataagtcatcagcttagacaggtatgggacaacgaagctgggcgatacgtgtggcgtttcccgaaggtgcgtgagatgaatgattaccatcatgcccatgatgcgtatcttgctaccgaggtaggaaggttcatctcgattcgctatccggagagctatacaaacccggtcggtatggcaaaagcgatgcgtacctacatcaagagaagagctaatcagtacgctatcgatcacaaggctcctggccacagcttcattgctgcaagcttcttggagaatggctttgacaaggaaactggggtagtcactcgcgataagtgggacgctgaagcagagctggcacggatgacgaaatatttcaatattccggattgctacataacaagaatgcccgaaatcactgcaggagccttcagtgatgcgacgctgtattctcctcgaaacaaggagaagtatgccaatcttgctatgcgattgaaaggaaatctggaaactcagaagtacggcggcttctcgagagaacagtttgcgtacttctttatctatgaaaaacaggacaagaagggaaggaggctattctgctttgagtctctttcggtaagcagagcggatgaggtacaacgctacggtgttgccgcgctagaaagatttgccaagaatctgcttgctccaggcgagactttcattcgtatcgtgaggcctgctctttacaagaatcagctcgttgagattgatggcagtcgggtattgttgcgtggtgctgcagaagtcagaaatgccaccgaaatggcctttggtctttcagaagcacggctactggcagatattgctgatggtaagacactcagcaagaaagaccttctcaggctctacgataggtatacggataaaatccagcgttatgcccatgagcttgacgaaaagctcaaccttagagagcatcgctccgcatttgaagctttggattccgttcagcagccgcaagtgcttctgcaggttcttgcgctactcaatgcaaaaactaatgcaatagacctcacgggcatcggtgagtcagcgcatgcaggccgcttgcaatataccttcaacaagttattgaactctggaagattcgttgtcattgaccagtcgatcacaggtatgtttgaaaaccgcgttacgttgagacacgaggaggggtag

SEQ ID NO: 215 - DNA, 4476 bp, unidentified
  misc_feature 1..4476: note = Synthetic sequence or unknown origin
  source 1..4476: mol_type = other DNA
atgggacaaattttaggtttagatttaggcactaacagtataggatgggcagttgtagataatgccgcacaaaagataatcgcattgggaagtcgaatcattcccatgagtgctgatgtactcgccgattacgagaaaggaacacttgaaacacagatggcaaaacgtcgtggatttcggggcacacgaagactttacgagcggagcaaattgcgtagggagcgtttgcatcgcgtattgaggattcttggtttccttccagttcaatatcagcagcagatagattttgaaaagcaccctggaaaatttaaggacaacggtgttccactcattgcataccgaaaagacgcatatggaaagcttcagtttgcattcatatcgtctttcaatgagatgattgaggactttgcaaaacatcaaccaagtctggtagcagacggcaaactgattcctcatgactggtgtctttactatcttcgtcagaaagcgttaacaaagccggtgtcgaaggaagagttagcatggataatcttgaatttcaatacaaagcgtggttactaccagagaatggaagaagaaagcgacaattccaagatggaagtatataagcgcctgaaagttgtggatgtggttgataatggcgtaaacaagagacgtaaagaccagcatgactatgtgatagaatttgaggagggtgtgaagaaaaccatcacaagcagatatatcccatacggggtgggtgatgaactgaatctgattgtttcttataaattagataaagaaggtaatagacgcacagacgtggaaccctctacccgaattgtgaacaacgagaaagactggacgctgctaaaaacaaaaacggaggctgacctggaggcaagttcgctgaccgtgggagcctacatctaccagcacattctgaatatcccaagcgataagatacgaggaagtttcgtcagaaccatcgaacggaaattctataaagacgaactcgtcagaatcttgaacaagcaagctgaattccatgaggaattaagagattctgccttatataaaaaatgcgtgaacgaactttatcatcaaaacgaggctcaccgtgcctcattagaaggtaaaagcttcacggatttgattgtcgacgatatcatgttctatcagcggccgctgaaaagcaagaaatacctgattagcgattgcccgttagagtcgtatacgtacattgacaaagagacgggcgagataaagcccaagagcgtgaaatgcatcaccaagtcgaatcccattttccaggaattcaggttgtggcagtttgtcaggaacctgaaaatctatgctaagcagcgcgaagtgaatggcaaactgcgtctcgactacgactgtacctctgaattcatcaaatcggaagacgatgtggcctcactgttcgagtggctgaacgagaaaaaagaaatcgaccagactcagttcttgaaatatccgggctttggcatcaagaaaaccgagttggacaattaccggtggaactatgtggaggataagaagtatccttgtaatgaaactcgttacttgataatgtctcgcctaaagaaagtagacaaagccttgacgctgactaccgacgagttctataagctatggcatatcctgtattctgttgacgaccgcatccagttggacaaggccttgtgctcatttgcacgaagcatagctgccgacgaggacgagttttgcagccagttcagaagcaccccgccgttcaaggccgaatatggttcctattcccagaaagccattgcgaagctgctgccgctgatgagatgcggaaagttttgggatgaggctgccatcgatgcttccgtgaaggaacggatagattccatcgtagccgtaggcattgagaatcagaagataatggaaagggttaacgagcggtcgatttcgttgtcacggatatcagatttccggtatatggaactgtggctggcactctatgtggtgtatggcgacaaggccgatgtgcgtgaagacaggagatggactactcccgacgatattgattgctatctccggtttaacctgaagcagggcaccatgcgcaatccgattgttgaacaagttgtaaccgagacactccgagtggtcagggatatttggaaggcttacggaagtattgacgaggtacatattgaactgggtcgggaaatgaagcagactaaagatcagcgcctgaaaacattggcaaggatcacggacaacgagaataccaacatccgcatacgcgcgctgctgcaggaatttaccgatccgtcgtatggcgtgaaagatgttcgtccatattctccgatgcatcaggagaagttaaaaatttatgaggaggctgtgcttgatgctgtagaagcagatgatgaaatcaaggacattctgaaaggattccgtgaaacagatgcatcaaagaggccttcacataagcaggtggaaagatataaactgtggcttgagcagcattactgttcgccctatacgggtcagcctattcctatgtcacggctttttaccgaggactatcagatagagcatattatccccaaagcccgctattacgacgactctctcagcaacaaagtgatttgcgagagcgaggtaaaccagctgaagagcaatatgctcggatacgagttcattcgtgaaaagggtgggcaaataatcggcaacggcctgaagatattgaataccactcaatacgagtcttttatcaaggataattattctcgtaacagagcgaagatgaacaatctgctgcttgaggaggttcccgaaagtttcatcaatcgccagatgaatgattcgcgctatatctcacgggaaatcatgcacatcctgtcgaatctggtgagaaacgagaaagacgatgatgaacccgtctcaaagaacgtgattccgttgaacggaaaggttaccacggtgctgaagaaagactggggtcttaacgacgtttggaatcagatagtgtatccgcgtttcgagagacttaaccgcatcacggaaagctacgactacggagagtggcggatggtaggggggaagaaagttttccagacctcggttcctcttgccatatcgaaaggtttccagaaaaaacgcatcgaccatcgccatcatgcaatggatgcgctaacgatagcactcaccacccgcaaccacatcaacttcctaaacaatgtctattccggttcagaaggcatcaagaaccgtgaagccctgaagcgggtgttgtgtgacaaacaaaatggagaatggttgttcaagaaaccctgggagtcgttcacgcaagaagcatttacagcacttagtggtataatcgtatcgttcaagcagaacctgcgagtcatcaacaagatgaacaatcactatcagaaatatgttgatggcaggaagcaatatgtgaagcagacggctggcgattcgtgggccatccgcaagtccttacacaaagcttcggtctcggctgctgtaaatctgaaacttgttaaaagcaccaggcttgccgatgccctgaaaaacgattgggaactgatatgcgacaaggagataaagaaagccatcaaagaactcattaaacagtatggtggccgtttcgatgcaaaggttatcaccaaatactttaaagacagagatttcaaacttaatggaaaggatatctctaaagtggaagtattctattactccgacgagaaagaaccactttcggctcgccgcgaactattagacaccagctacgacgagaagaaaataatgagcataacggatactggcattcaaagaatcctgttaaaccacttgcacaaatacgatgatgaaaagggaaaggctcatcccgagaatgctttctcgccagaaggtattatggaaatgaacaagaatatccaggaactgaacggaggaaaaccccataaacccatttactctgtgagaaagactgagagtaagggaatgaaattctctgtaggttcctcaattaataatttacgcaaatatgtagaggcagacaaaggtacaaatctatatttcgctatctatatagataatgatggattacgttcttatgaaagtattccttttaacattgtggtagagaggctaaaacgacgactacctgctgccgaggaagtgaaagaagacggaagaaaactgttgttcactctttcgccaaacgatttggtatatgttaaagaagacgatagtaagattaatgaaaacgataatttggataatgggtctgtgtataaaatgatttcgagttctgatagagattgtttttttatacctgcttttgttgcctcgcctattgtcaaaaccatagagttaggctctaacaataaatctgagagatcttggaacggattacaaatcaaaaaagtctgttgcaagttatatgttgacagattaggacgagtttataaaataatacaatag

SEQ ID NO: 216 - DNA, 4614 bp, unidentified
  misc_feature 1..4614: note = Synthetic sequence or unknown origin
  source 1..4614: mol_type = other DNA
atgaaaaaaattttaggacttgaccttggaaccaacagtataggttgggctttagttgagaaatctgacaaagaaggaaggattatcaaatcgggcagtagaataatcccgatggatgcaggtgaacttagtgactttgcaaatggtaaaacaaaatccaaaaccgcagatagaacatcaaaaagatctgccagacgtttgagggagcgttttctcctacgaagggagcggcttcatagattacttagaataattggccttcttccaaaacattatgaagaacgtataggttgggatattgagaacgatgaaaagcattttgggatttttcttgagggagaagagcctaaaattaattatttaaaagatgaaaacggtaaaaataggtttctctttgaagactcttttttagaaatggtaaaagaattcaaagggaagcaccctgaattgaaatcaatacccaaagactggactttataccaccttcgtaacaaagctcttcactctaaaatatcaaaagaagaactcgcatggatcatccttaattttaatcagaaaagaggttataaccagttaagagatgaagtcctggattcacaagatgggaaaaaatcagaatacaaagagcttattgtaaaaaaagtaactccagacgaagactctaaaggagaaaagaagtggtatacaattgaatttaaaggaagtgatattatatatcgaagacaaagtaaatatgacctcgattgggttggaaagaaaagagggttgattataactacaaagattgatgagaatggggagacaaaactaaaaaaagacggaagccttgattatagtatcaaatcaccagaagacgatgactggggacttttaaaaatcaaaacagaacaagacctcagactatctggcctcacaattgggcagtatatatatcacgctttattagataatccttcacaaaaaatccgtggtggattagtaagagttattgagcgctctttctataaagatgaattaagaaaaatcctagaaaagcaatgtgaatttcatccagaattcaatgatagagatttatatgaaaaatgcatcacagaactatataagaacaacactgcccatcgaaataatattaaaaataaagatttcacttatttaatacttgaagatgttcttttctatcaacgtcctctaaaaagtaaaaaatcgctgattgacaattgtccttatgaatcacataatggttttgacaaggaaactggtgaaataaaacaatttccaattaaatgtatcgcaaagtcaaatcctttctatcaggaatatcgtatttggaaatttctaagtgacttacgtataatagcaaacacttatgaaaaagacggtcatttgtattccgatgtagatgtgacacaagaatttataaaggacagctatgcaatgtctgatttatttttgtggctaaatgatttggcaaaagtagaccagaaaaccatgcttaagaaacttggcattaaaaaggcagaagaaaataaatatcgttggaatttcgtagaggataaaatataccctatgaatgctacgcgtcatgctattttatcaaaacttgataagggggagaaacttactaaagaaaatgaatacttattgtggaatctcctttattccactcaatctaaagcagaaatagacaaatccttatccgagaacaccccatcgggaaaaccgaatactaataaactctataataaattgaggaaagacggtatttcttctgaatcgctggagaaaataaaaacaataaaattacctgatgaaggatatggtgcatactctgaaaaagcaattaaaaagcttctccctctgatgagaactggtcaatgctgggatgctgataatatagacatgtacacagcatctagaatccaggcatttattgaggagaataatcttgataacttttccgaacgtatttggagccgtatatcttcattaaaaactgttgattcttatcaaggattacctgaatggttagcatgttatatcgtttatggtaggcatagtgaagctaatgaagttgttaagtggaaaacgccacaagatattgatatgtatctgaataatttccgtcaatattcactaaggaatcctgtggttgagagcattgtccttgaaacgctaagagttgtaagggatttgatggcaaagtatggaaattttgacgaaattcatattgagttaggacgtgacctgaagaatccaagtgataaaagagcctcaataactaagcaaattcttgaaaacgaaaacacaaatcttagaataaaagctcttattagcgaatttactgatagtgaattcaaaatagagaatgttcgaccttattcaccgagtcaacaggaattgctcagaatctacgaagaggatatcctcaaccaatacgaacctgattcagagattcttggtatcattaaagaattatctaacccaacggtacaaccttctagaaataaagtgttaaaatacaagtgttggcttgatcagaaatatgtttctccatatacaggaaagcctataccgttatctcgtctctttacttctgattatgagattgagcacatcatccctcagtccagatactttgacgattcattttccaataaagttatttgtgagtcagaagtcaataagctcaaagacaatcttttagcttatgaattcatcaaacagcatcatggctatacattacaaagtggtgtccgtatttttgaagtaaaagagtatgaagaacatattaaaaacgtatattcttcaaggaaggcatcttctaagcgcaaaaaactattgatggatgacataccaacagacttcatcgaacgacagctaaatgacagcagatatatcagtaaggttgttaaatccttgctttcaaacctagtcagagaggaggatgaaaacggtaatcttgaacctgaagccatctcaaaaaatctaatagtgtgcaatggaactgtaacaacaagattaaaaagagattggggccttggtgaagtatggaattcaatagtacttccaaggtttcaaagactgaatgatttaacaggacgtacatgctttacaactacaaataaagaaggtaaggagattccggcaatgccactagaacttcagaaaggatttaatattaaacgtattgaccacagacatcatgcaatggatgcaattgtcatcgcttgtacaacaagagaacatgtaaacttgctgaataacgaggcatcacttcctaagaataaagaaatgaaatacgctctttctcacagacttaggagatacgcagaagaaattgttaatggacagaaacgaaatattccaaaggagttccttatgccatggccttcattcaagactgattgtaaaaattcacttaatgagattgttgttagtttcaaacaaaacataagagtcctaaataaagccacaaacagttattttgcttacaatgacgatggccataaaattctgaatcatcaacatggatccgatcactttgccattaggaaatctttacataaggagaccatattcggacatgtgaatttaagatggaaaaaagaaggaaagttgaaagaagctatttcaaaaccatctatgattgttgataggcgattgaaaaagaagattcaggagatgcttaataagaactattctgaaaaacagattttagcttactttaaaaatttctcttatgaatggaaagaatttgatttcaacaaaatagaactgtattacttttctgacgaaaaagaggcattagttgccactcgttttggaaatgaccttgtaagtttatttagtggtaaaacaaaaaaggaagaaattgaaaaagttattgaaaaaataacagattctggcataagaaaaattttaagtacatatcttagtcaaaatctggagaaaattgaggaagcattctcacctgacggtttagagaagatgaatgaaaatatctcttcctataataatggaaaggagcataagccgatttataaagtcagattgtttcaacctaaaggtaataaatttttagttggagatgttggatgtaatagtaaaaaattcgttgttgctgatgcaggaacaaacttgtattttgccgtatatgcatcttcaaatggaaaacgaacatacaaaactataccattagaggaagttattgagaggttgaaaaataaaatatccccagtaccagatattgatgaaaatggaaacaaccttttattccatttatcacctaatgatatagtatatttaccaacaacagaccaaatcatatccaatcatgatttaattcaagattttgacagaaatagattttatagatttattgatagtagcggcaccactgctaatttcataccagctaattctgcaaatgtaatttaccatttagaaaaaaacgaagcgaagaagttctgtatcggtgcggttatacaagacgaatatggaaaaggaagtccccaatccaaaaatcagaaagcacctacaaaagatgaagaaatgattaaagaactttgtataccattatcaataaaccgtttaggtgacattaaacaaaaatga

SEQ ID NO: 217 - DNA, 2967 bp, synthetic construct
  misc_feature 1..2967: note = Synthetic sequence or unknown origin
  source 1..2967: mol_type = other DNA
ggtaccgagaagcggatcttcggcttcgacatcggaattgccagcctcggatgggccgtcgtggatttcgatgatgccgccgatcctgagaacaacatctaccccaccggcaagatcgtgaagtccggcgtcagatgcttccccgtggccgagaatcctaaggatggatcttctctggcccagcctagacggcagaagagactgctgagaaggctgtgcagacggaaggccagaagaatggccggcatcaagaacctgttcgtgaccaacggcctcgtgggcaaagacgccctgttcaacgagaagtccaatatctacaaggcccgcgagaacaccgacgtgtggaatctgagagtgaaggccctgacagagaagctgaccaccatcgagttcatccgggtgctgacacacctggccaagcacagaggcttcaagagctatagaatcgccgccgagaaggccgatgccgagtctggaaaagtgctggaagccgtgaaggccaacagagccctgctggaaaatggcaagacactggcccagatcatcgtggaaaaaggcggccagaagcggaactggaaggataagaaaggcgacgccacctacgccaacagcatccccagagatgagatcgagagagagacacggctgatcttcgagagacagagagcctttggactggccgctgccaatgagaagctgcagagagatttcgagcggatcgccttccggtttagacctattgccggcgtggacaagatgatcggcaagtgccagttcgagcccgacgagcccagagcacctaaaaatgcccctagcgccgagttcttcgtggcctggaccaagatcaacaactgccgcgtgaaggacgaggacggcagatccagatttctgacccaagaggaaaaagagacagtctttaacctgctgaaggaccagaaagagatcaagtacagcgccctgagaaaggccctgttcgccaagaggcctgacatcaagtttgccgacgtcgagtacaaccccaagcctgtgtacgacaagaaaaccggcgagatcaaagagcctcctgctccagagaacctgaagttcttcagcctgaaaggctggaacgagctgaagcgcgtgatcgacgtgtccgcctatcctgtggaaaccctggataagatcgccaccgtgatcgccacacagaagaacgacgccgatatcagcggcgagctgaaacagctgggcctgcctgatagcgacatcgagagactgcagggactgcagttcaaagagttcatcagactgtccctgaaagccctgtacaagatcctgcctgagatgatgagcggcaagaagtacaacgaagcctgcgacgccgtgggctacgatttcaagagcacaggcgagagctttgctgcccagaagggcaagttcctgcctcctattcctgagagcctggccaccaccgtgcctaccgtgaatagagccatcagccagttccggaaggtgtacaatgccctggccagagagtacggcacccctgaccagatcaatgtggaactggcccgggacgtgtacaacgaccacgacgagagaaagaagatcgaggcccggcagaaagagtacgccgaagagaaagagaaggccaaggctctggctcagagcaagaccggcatcgaggatatcggaggccgggatctgctgaagttcagactgtatgagcagcaggacgggaagtgcgtgtactctggcgaagcactggatctgaggcggctgaccgagcaggactactgtgacgtggaccacatcatcccttacagcagaagcctggacaacagccagagcaacaaggtgctgtgcctgagcagagagaaccggcagaagtctaacaagacccctctcgagtacatcaacgaccccgtgaagcaggccgagtttattgccagagtgaagtccatgaagggcctgaacaaggccaagaaggacaggctgctgacccggggctttgatgagagagaggtggaatttcgggaccgcaacatcaatgacacccggtacatggccagatacgtgatgaagtacctggacgactgcatcgacttctcccagtccaaggccgccatcaaggacagagtgcagtctagaaatggcgccctgaccgacttcctgagacaccagtggggcctgagaaaagacagagccgagaacgacagacatcacgcccaggatgccatcgtgattgcctgtgccaccaacggctatacccagtacctggcctgtctgagcaagatctttgagaacaagcaggcctatgccaacaaatacggcgagccttggtacaaggccttcaagcagagagtgaaacagccctgggacggcttctatcaggatgtgcaggcatctctggccgaggtgttcgtgtccagacctcctagaaagaatgccaccggcgaggtgcaccaagagacaatcagaacactgaaccccgacaagccccagtacagcgagaaggatgtgaaaagcggcgtgaagatcagaggcggcctggccaacaatggcaacatgctgagagtggacgtgttcagccggaagaacgccaagggcaaagaacagttctacctggtgcctatctatctggccgacggcatcaaccccgagctgcctaacaaagccatcgtggctaacaagcccgagagcgagtggatcatcatggacgagacatacgccttcaagttcagcctctacaaggacgacctggtcaaggccaaagggaaagagctgtacttcggctacttcgacggctgcgatagatccaccggctgctttcacattgaggcccaggacagcagccagtattggaaaggcctgggcgccagaaacctcgagtatattaagaaataccaggtggaccctctggggcgctacgtggaagtgaagtctgagacaaggctgcccctgaacatcaagaagggaaaccccggatcc

SEQ ID NO: 218 - DNA, 2997 bp, synthetic construct
  misc_feature 1..2997: note = Synthetic sequence or unknown origin
  source 1..2997: mol_type = other DNA
ggtaccgccgagtatacactgggactcgatatcggcgccaagtctgttggatgggccgtcgtggaaaatggcaccagagccagaattgtggccatgggcgtcagagtgtttcccgaaggcgtggacagagagaagtccggcctggaaaagagcaagggcgcctctagaagagaagccagaggcgccagacggaccagaagaagaaggaccctgagaagaacagccctgatcgctgctctgagaggtgctggacttgctcctgctgatgatggcgaactggccggactgctgtctgaggttgacccttatcctctgagagccaaaggcctggacgagcctctgacacctcacgagtttggcagagtgctgtaccacatcaaccagcggagaggcttcaagagcaacagcaagagcgccaagcagaaagaggacggcgagattgccaaacaggctggactgctgcaggccgccattgaagctgctggatgtagaaccgtgggcgagtacttcgccagaacaaaccccgaggaaaaccggatcagaggccactacaccttccggtctatgtacgagcgcgagttcgatctgctgtgggccaagcaggccgtgtatcaccctgatgtgctgaccgatcacctgtgccagcagatccgggacagagtgatcttcttccagcggcctctgaagcccacagatgccctgattggagagtgtggactggaacccggcgagaagagatgtgccaaagctgcttggtgcgccaggcggttcagaatgctgcaggacgtgaacaacctgcggattcacaaccccgacggcagagaagtctgtctgtctgatggcgagcgggaaatcgtgctgagagagatgcagcagaaagccaaagtgaccttcagcagcatccggaagaagctgaacctgctggaaacccaagagttcaacgccgagtacgaggtggacgagaaaggcggaagaagagaggctctggccggcgacgcttttagcgccacaatgagaagcaagaaggtgttcggcaacaaggcctgggatgccatggacgaagctcggaaagtgcggctgaatgaggccttcgtggaactggaagatgacgagctggtggaagtgctggctggcgaatatggactgtccgccgaacagatggaagccgccatgaaggttccactggaacggggctacatgagcttctccagaaaggccatcgagaaactgctgcccctgatggaagctggcaagagaacagatgaggccctggatgctgtgtaccccggcagaaatcagagagctgaaggcgtcggagtggaaagactgcccatgcctgaggacctgcggaaccctattgtgaacagagccctggtcgaagtgcggaaggtggtcaatgccattgccagagagtacggcaagcccaagagaatcagagtggaaatggcccgggatgtgaagggcagcgccaaagagagaagagaaaagcactacaagatgctggacaacgagcggcggaacgctgaagtgcgggaaaagctgagacaggacatcggcattgccaggcctaccagggacgacgtgatcaagtacaagctgtgggaagagtgcggccacacctgtccttataccggcaagcacattagccagacagccctgttcggccccaatcctgatttccaggtggaacacatcctgccttactctcggtccctggacgacagctacatgaacaagaccctgtgcgaagtccgcgagaatagagtgaaggccaacagaaccccttgggaagcctatggcggcgacgagcagagatttgagcagatcctgcagagagtgaaaaccctgccttggcctaagcggcagaagttccaggctaacgagctggaaggactggacgcctgtatccagagagaactgaacgacacccggtacatcagccgcgaggttgtgcggtatctgaaaatgctgggcgtgatcgtgaccggcacaagaggatctgtgaccgccgaactgagacaccagtggggcctgaataccattctggacccaacaggcagcggcgagaaaaacagagccgatcacagacaccacgccatcgatgccgttgtgacagccgtgacctctaacgagcatctgagaaggctggccgagagcaaatacggcaatagaggcgacggattcgcccctccatgggaagagttcagagaagaggtggaagagaacgtgcggcagatcaacgtgtcccacagagtgcgcagaaaggtgtccggcgagctgcacgagaaaaccttttacggccctaccagcgagacaggcatctacgtgtacagaaaggacctgaccgctctgactcctgccatggtggccaagattgtcgatcccgtcgtcagagaaatcgtggaagaacggctgcgggcctgcaagatcgatggccagagagacaagaaaatccccaaagaagtgtggaacgagcccctgtacatgcggaccaccaagagcgataagaaggtgctgatcaagaaagtccggatcagggacgtgttcggaaagaccatcagcttcagagatggcagcggcagcgtgtacaagacagccaagcctggcagcaaccaccacgtggaaatcttcgagtacaccaacgagacagacaagagcggcagacctagaagggatgccgtggtggtgtctctgtttgacgccgtgcagagatctaagaggggcgagcctgtcgtgtgtagagatcacggccctggcacaagatttgtgtgcagcctggccatcaacgagatggtgctgatggataacggctccggcgagatggacctgtacagagtgcagaaaatggacgtgtccaagaccgtgtacttccggcagcatacagccgccacactcgaggatgagggcaccctgattagaaaggccgctcacgtgttcgagggctacaaagtggtggtggaccctctgggcagagtgtacagagccaacgatggatcc

SEQ ID NO: 219 - DNA, 3003 bp, synthetic construct
  misc_feature 1..3003: note = Synthetic sequence or unknown origin
  source 1..3003: mol_type = other DNA
ggtaccaagcggagagtgttcggcttcgatctgggaatcgcctctatcggctgggccgtcgtggaatttgacaacgagtactacgacatggaaaccggcgagatcctggccgacaaagtgaatggatctggcgagatcgcccagggcacaatcgttggctgtggcgtcagaacctttcctgtggccgagaatcctaaggatggcagctctctggccgctgccagaagagagaaaagactggccagacgggcctgcagacggaaagccagaagaaaaaaaggcctgcagggcctgtttgccgccaaaggacttgctgaaagccctgccgccttcaccgacgagatctgtatgagacagatcggcggcgacgtgtggaacctgagagtgaaggctctgcaagagaagctgagcaaagaggaactggcccgggttctgtaccacctggccaatcacagaggcttcaagagcgtgcggaaggcccaagaggaaaacgacaaggatagcggcaaggtgctgagcgccatcagagccaatatggccctgaaagaggacggcaagtctctggcccagatcatcgtggaaaaagccggcgagacaggcaagaagcggaacttcagcaaggtggtcaaagtgaacaagaaaggcgaggacgtgaaagaggccgactaccggaatagcatccccagatctgagattgaggccgagctggccatgatcttcaccaagcagaaagagtatggcatcttcacccaggacctgtacgacgacttcgtgaagatcgccttccggcagaggggcatcaagtctgtgggcgacatggtcggaaactgcaccttcgagaaggacgagaagcggagccctaaagaagcccctaccgccgagtttttcgtggcctggtccaagatcaacaacctggccgtgtacgagggcgacaagaagagggaactgacccctgaggaacggcagaccctgttcgatgtgctgaaagtgaccaaggacatcaagtacaagaccatccggtctaaggtgttcaagggcaaagacatccagttcacctgtctgaactacagccctaagcagaagaagaacaaaaacggcgagctggtcaccatcgatcccgaggatgtgctgttctacaacatgaagggctggcacaagctgcagagcatcttcaaggccgagtacagcgacatcttcaacgacatcaagaaactggacaaggccgtgaccatcattgccaccgagaaagaggatgtcaagatccaagagaaactgcaagagctgggctacagccaagagaagatcgacaagtttctgaccctgagcttcgataagttcatcaacctgagcctgaaggccctgtacaagatcaatccctacctggaaaagggcgagaagtacgacaaggcctgtgccaacgccggctacgacttcaaagagatcaccgacaagctggtcaacgagaagggactgctgctggccgtgatcgacaaagaaaaactgaccaaggtgcccgtggtcaaccggacaatcgcccagttcagaaagctgtacaacgccatggtccgacagtatggcgcccctgaccagatcaatatcgaaaccggcagggacctgaagaagtccgccgaggaacggaagaagatccagaagctgcaagaagaaaaccgggacaagaaccagagcatcaaaaaacagctgctggaatggggcgtgaaggacaacggcaccaacatcaccaagctgcggctgtacaatgagcagcagggcaagagcatctacagcggcaatgagatcaagatcgagcagctctttgacgacggctacgtggaaatcgaccacatcctgccttacagcagaagctggaacaacagccagagcaacaaagtgctggtgctggcccgcgagaatcaagagaagggcaatcagacccctttcgagtacatcggcaagagcgacgccaagtccaaagagtggaccgacttcaccagctacgtgacaagcttcgccagcatcgagaagcacaagaaagaaaagctgctgctcgagacattcaacgagagagagcaagagttccgggacagaaacgccaacgacaacagctatatcgccctgtacgtgaagagatacctggaagatggcatcgacttcggcaagtccctgcacaccgagattaagaacaaggtgcaagtgcggagcggcaacgtgaccgcttttctgagaaggcagtggggcctcgagaaagacagaaccgagagcgataagcaccacgctcaggatgccatcgtgatcgcttgtgctgctcaaggcatggtgcaggccctgagcaagattagcagaaaagaaggcgtggtccacaccgacgccgtgcaccggaaatatgccattgccaagccttgggacaacttccggaatgacgtgctgacagccctcgagaaggtgttcgtgtctcggtcccctagaaagaaggccagcggagagatccacagcgagacaatctacaccctgaacgagaaaaagaagcagttcgaggccaagaacgccaagagcggcttttacgttagaggcggaatcgccggcaacggcgacatgctgagaaccgacgtgttctgcaaaaaaaacaaaaaggggaaagtgcagttctacctggtgccgatctacaagtccaacctgggcaaagaactgcccaacaaggccatcgtggccaacaagaacgaggacgagtggacagtgatcgacgagagcttcagcttcatgttcagcctgtttctggacgacctgatcaaggcccagaaagacgagacagtgaccttcggctactacaaaggcgtggacagagccaacgctgccatcacaatcgaggtgcacgacagaagccaggacaacgccagaatcggcacaaagaccctggactccatcaagaagtaccaagtcaacctgctgggcgagtatttcgaagtcggcggagaaaagaggcagctgctgacccacgaagagggatcc

SEQ ID NO: 220 - DNA, 3048 bp, synthetic construct
  misc_feature 1..3048: note = Synthetic sequence or unknown origin
  source 1..3048: mol_type = other DNA
ggtaccggaaagagagtgtacgccttcgacctgggcaaagccagcatcggcttttgcgccagagaggacttcaacatcctggaactgggcagcctgatcgtggacaaggatcacgccgaagtgatcagcaacagagacagacggcgggtgtacaagaccctgtacgcccacaagaaccgcgaggacttcttcaacaagctttggagcgactgcggcctgaatatcctggaaaaggacgacaagaagttcaccaccgagttcagcaagcccaacgacaacaccatctacaacagcgccctgctgagaattgccctgctgcaggataagcagctggaagagtggcagatctacaaggccctgcacaacgccatccagagaagaggctatgacgccgatattgcctgggccaatgccagctctgccgacgagaaggacaacatcgagcgggtgtccagatacacccaggacgataagggcatcgagatcatcaagaacgagaagttcaagtacccctgctactacgacgccctgtctctgagcctgtgggaagagaacaaccccgccgagtacaagaaacatctgcccctggccgacatcaccaaagtgcggacaaaaggactggtggcccctcgggcctttgtggaaaaagagctgaccgagctgttcttcaaggcccagaaacagctgcctcagctgaacaagtacagcgtcgagtacttcctgtacggccagtacggcagcgcctacgccacctttagaaagcccgagcagggaaaagaaaaggactacggcgtgctgggccagaagatccccagattcgacaaccggatcattgccaagtgcaagctgctgcccaagcggaacgtgtgcaaggccaacaccaaagaaaacgtgtccttcacactgctgatgaagctgaagaacctgcggttcaccgacagcctgggcaacaagtgtatgctggactccgaggccatcaaagagatctttaacaactggctgatcaaagccaacaagaacgacatcctgaagctggacaccaccatcaccaagaaagagatcgagaacgtcatcggctgcaagatccaggataagatcgagcccctgaaggccaatatcagcggcagaagctccttctgcagacgggcctgccagatcatgaacaagatcattctggaaggcattcagaaccccgccaccatggatgtggccgagttcaccgatgacatcaacagcgacaatggcatcaccgaggccgagatcagagagatgctgagcaagatcggcacctgggacaacctgtacatccccgacaacagatacgagatggccgagctgagcagcgacgacagacagaaaaccgacttcctgatcggcaagatcacaaaccccatcgtgcggaacagactgcagatcctgcgggacaaactgctggaactgaaggacaagcacggcatccccgatagcatcatcttcgagttcatccgcgacggcgccgacaatagcctgtatggcgccaagaaggccaacgactacctgaagaataccaaagagaatgagaaagagaacctcgagatcaagaaagaactcgaggacgccaacgcctactctcccagcaacttcgagaagctgaaactgctgaggatgcaaggcggagcctgcatctacagcggcaacaagatcggaatcggcaatttcgacgagtgcgacatcgaccacatcttccctagagccaaaggcggcaacgatgccctgtacaacagagtgctgtgctacagcaagctgaacagagagaagggcgacagaaccccttacgagtggctgtccagcgatagagaggaatgggccaagtacctgctgcacctgaacgacctgaagtccagcctgggaaagaagaagttcgagctgctgacctgcaagccccaggactgcgagaaactgatcgagagctacaacggcctggtggaaacagcccagattgccaaagtggctcagcagctggccgcctttatctttggatggggactgcagaccgagggcgacaagagacacctgttcgtgaacaatggctccaccaccgccgccatcagaagaagatacggcctgaacaaaatcctcggcaacgacatcaagaagaaccgggaaaacgataagcaccacgctctggacgccatctgcatcagcttcagccaggactttaagtacgaccccaagagcaagaaagacgtgatccaggacttcacctacgacttcgtgaagaacgccatcgacaagctgatcccttatccatacagcaacgacaagcccttcaagggcaacacccggcctctggaaaccatctacggctacagagagtacggcgagaagaagtacatcacaaacaagattgacatcagcaccctcgagcagaaagaaaagaagatcaagaccatcatcgacgagacaatcaagaatgacctgctcaacaagatgaacctgagcaaagaggactggaagaacatgctgcagaactacattcaccccaagaagcagacccacgtcaacaaagtgatggtcatcgtgtccgagggcaagctggatttcgacaagaacggcagagcccggatgaacgagtacgtggactttggcaccaagggcgtgaagaatcagttcaagcactctaagggccacaagggccagatcctgtactacaacgagaaaggcgctatcaaagtcatgcccatctacgccaaccagaaaaccctggacgtgaaactgaagctgctggacatgggctgcaatctgtacaagaagggaatcatcttcagcagcggctgcctggtcgagatccccaacgatttcgaggccaacgtgtactaccacctggccgataacgacggcaaggataagctggtgcccacgaaagaaaaagtgaacaacggcatcttcaagatccggaccatcatgagcgacggcaaagtgaagctcgagaacaacaacggaatcgagatcctgaccaacgccgccacactggtcaacgccaacttccacaagtacaagatcggatcc

SEQ ID NO: 221 - DNA, 3057 bp, synthetic construct
  misc_feature 1..3057: note = Synthetic sequence or unknown origin
  source 1..3057: mol_type = other DNA
ggtaccaagaagatcctgagcctggacatcggcatcagcagcatcggaaatgccgtggtggaactggacgacgagaacttctacggcaagatcctggatgccggcgtgcggattttttctgccgctgaacagcctagcggcgattctctggctgcccctagaagagaagctagaggcgccagaagaagaatcagcaggcggagcagcagactgtacaacatcaagaagtacctgatcctgaacaacttcatcacccaagagcagatcgagaacctgtactgcagcaacaagcagatcaaggacgtgtggaccctgcggaaagaggccctgtaccggaagctgaacaacgaagagttctaccgcatcctgatgcacattgccaagcggagaggcttcaagagcatcagaaagagcgaggaagccaagaaagagggcgacctgctgaaggccatcaagcagaactaccaagagttcgagaacggccagtacaagaccatcggcgagatgttcgccgagaaggacatcaagaggaacaagcgcgagaagtacaacaacagcatccccagggacctgctgcagaaagagatcgagatcatcttcgagacacagcggaagctgggcagccctctggccaaagaggaaaccgagaatttctacctgcaaaccgccttctaccagcggccactgcagagcatggaagataagatcggctactgcagcttcgagcccgatgagaagagggcccctaagtgtgcctacaccagcgagatctttaccgccgccaccaagctggtcaacctgagcattacagatgagctgggcgagtgcagagtgctgtgtggcgacgagatcaaacagatcatcgagctggcccacaagaacaccaaagtgacctacaagcagctgaagaaagagctgtgcctcgaggacaacatcctgttcaacggcctgaactacaacaagaaggacaagaaccccgaggacagcaccctgatcgagctgaaaaactaccacctgatcaagaaatccatcgtgaacgacaagaatctcggcaaggtgtacttcgaggccattaagtacgacaaggacctcttcaacaatatcgccaccgtgctgacctgcgagaagtccgatgagagcgtgatcgcccggatgaaggaatacttcatcgacgacaagatcattgcctgcgtgaaggacctgtccatgagcaagaccatgcacctgtctctgaaagccatggaaaagatcctgccttacatgctcgagggctacaagtacaacgaggcctgtgaactggccggctacaaccaccacagcatcagcaagaacaagaccaagcagaatttcctgcctgtgctgcctcaagaagaactgaccaccaatcctgtggtcaaccgggccatcagccagaccagaaaggtggtcaactctctgatcaagcggcacggcaccttcgactacatcatcatcgaaatggcccgggacctgagcaagagcttcgacgagcggagaaagatcaagaaggcccaagaggactttcagaaccagaaagaactggcccggaagcggtgcatcgagaatggactgaaccctgactaccccaagtccaatctgctgaagttccggctgtgggaagaacaaggcggctactgtatctacagcggcaagtacatcgaccccagaaagctgagcgaccaggactacacagacgtggaccacatcatcccttacagcaagtccttcgacgacagcctcaacaacaaggtgctgtgcctgtccgacgagaatcggcagaagggcaacaagatcccctacgagtacatcggggagagcaagtggtacgacttcgtgcagcggatcaagacctacaacctgaagtccgccaagtataaccggctgatccggaagtcttacgagagcgagggctttaagagccggaacctgaacgacacccggtacatcaccaagttcatcaaggattacatcaaagagaacctggacttcgggaacaacctcaaggtggaaaccagaaacggcagcctgaccgccttcctgagaacacagtggggcctgattaagaaccgggaagagaacgacagacatcacgccctggatgctatcgtgctggcctgttctacacaaggcatggtgcagtacctgagcaccgtgtccgccaaaatcgagaactacaattacaccaaggataagaagccccggttcaagcggccctgggccaccttcaaagaggatgttgagctggccatctccaagatcttcgtgtctagagccctgagagcctccgtgtctggacagctgcacgatgccacaatcagaagccccaaacatctgcaggacggcttcacagtgctgaaaacccctctggaaaaaatcaacctgcagaccctcgagaagatgtacgacaaagagcggaacattaagatctacaatctgctcaaagagcgcctgacgaagttcaacaacgaccccaaaaaggccttcgaggaacccgtgtacatgcccatgtccgaggaaaagctgaagcagggccagaagcctcatctgatcaaaaccatcaagattaaggacaactccatcagcggcatcaaggtgcacaacggcttcgcccagaacaccagcatgcccagagtggacgtgttcaccaagaaaaacaagaaagggaagaacgagtacttcctggtgcctatctatatcgccgacttcggcggcgagctgcccaacaaagccatcagcaccggcaagaaccggtggatcgagattaccgacgactacaccttctgcttttctctgtaccccaacacgctgatcgccatcaatcctaccggcaagcccgaggatgagttcctgggctactacaagggctgcgatatcaccaccggcaccatcaagctggacagccacgatcggacaatcaaggacaagcggatcagcaccaagaccgccgcctacatcaaaaagtatcaagtgggcgtgctgggcgactaccacgaagtgaagcacgagaagagactgaagctgaagggccccaagggatcc

SEQ ID NO: 222 - DNA, 3081 bp, synthetic construct
  misc_feature 1..3081: note = Synthetic sequence or unknown origin
  source 1..3081: mol_type = other DNA
ggtaccatcacactgggcctcgatctgggcatctcttctatcggatgggccatcctgagcgagaacgccgccaagagagagctgatcaactggggcagcagaatcttcgaacctggcgtggaaggcaccgagaatgagatttctgccggcaagggcgtgtccagatgcgccaatagaaggctgaagaaggccctgcggacccagtacttcagacgccggaagagaaagaaggacctgatcgacctgctgatcgccaatggcctgctgcctgagaatgtggatagcgccttcttcgccgagatcgacaagaaactgctgatgctgttccccgtggccgagagaaagcacattggccacgtgctgccctacttctacagaaaggccgctctggaccgggtgctcgagaagtatgaactgggcagagccctgtaccatctggcccagagaagaggctacctgagcaaccggaagcaagagctgaaagaacaggatgccgctggcgtggtcaagaccagaatcaatgagctgaaacaggccatcagcgagagcggcgctagaaccctgggcgagtactttacaatggtggaccccgaggtggaacggatcagaagcagatacaccgagcggagcatgtaccaggacgagttccggaagatctgtcagacccagagagagcacatcagcgccgagctggaagagaagctgtacaaggccgtgttccaccagctgcctctgaagtcttgtaaaggcctgatcggcaagtgccggctgtaccccgagcatagaagatgcagcatggaaaagcacgaagcccagctgttccggatctacaccagcgtgaacaacctgcggatcacatgcaagaaccagatccgcagcctgaccgaggacgagagactgaaagtgatcgagatcctgaacggctacagcgacatcttcaccaagagcggcaaagtgaccctggccaagctgcagaaagccgctggactggccaagggcgagaagttcaatctgggcgacgacgagaaagagatctacggcaacgagctgaacaacatcctgtacagagccttcggcgacaaggccgctgaaatgcagcaggctgagcaggacaagttcttcaacgacctgcggagcatcgagaagtctcacgtgctgatcaagcggctgatcaattactggcagatcagcgaggaaaaggccgaggatatcgcctctatcgccctgcctgataactactgcgcctacagcctgaaagccctgcaagagatgcttcctgatctggctgctggcgtgacactgcctcagtggctgaaactgaacaatcacacccagatcgccgacaaagagttcgagctgctgccactgctggacgactgtagcttcgagctgagaaaccccatcgtgcacagagtgctgaccgagatgagaagagtggtcaacagcatcgtggaaagatacggcaagcccgaccggattcatgtggaactggccagagatctgaaggccaccaacaaagagcgcgagcagatcaccatccgcaacagaaagcgggaaaaagagcggctggccattgccgagaggattgccaaagaggccggactggaaaagatcagccggaacgacatcctgaaagtcatgctggccgacgagtgcgacttcacctgtccttacagcggcgagcacttcagcatgtctgatctgcttcacggcggcctggtgcacatcgagcacattatcccttacagccggtccttcgacgacagcttcgccaacaagaccctgtgcatcaacaagctgaacgcccagaagtccaacaacaccccttatgaggcctttggcggctctgccgagtacagcgaaatgctggaaagagtgcggcacttcaagggcccctacgccgaaagaaagctggaactgttcgaactgcagaaggtggaacccgccgagttcctggaacggaacctgaacgataccagatacgccagcaagctggccatgcagtacctggctatgctgtatggcggcatggtggacaagaccggcaagcggagaatctatgccattgctggcggatgcacagccctgattcgtagagcctggggcggcaattatctgctcggagaaggcgagaaagtgcgggacgatcacagacaccacgccatcgatgccatgacaatcgccctgacaacccctggactggtgcaagaggtggccaagatgagccccgagagaagaagagagttcaacgacgccacacagaagttcatcgacagcagcttctaccagcaagcccacgccatgctggatgattgtgccgtgtctcaccacgtcgtgaacaagatgagaggcgccctgcacaaagagacaatctacagcaaggactacagcaacggcgagaacatccggcacgagagagtggaactgaaggcactgaccgccaaggacatcaagcagatcgtggaccctgccatcaagaacatcatcctggataagctgggcgtcgccaacgactacgaagtgaccgacgctatgctgaagatctttggcgacgaggccaactatcccgcaatgctggacagaaacggcaaccccgtgaacaccatcaaaaaagtgcggatcgcccggaccgtgaataccagaacagttggcaaaggcgacggcaagagagaagtggccaacggcgccaattacatcctggccatcttcgccaagctgaatgagaagggcgaagagacaggatgggagggcgaagtgatcagcctgatggatgccgtgcagaagaagcagagaaacgagcccctgttcgagaagaacagacccggcatgaagttcaagttcagcctccagaaaggcgacatcgtgaagttcaccaaggacggcgaggaaatcctgggcatcatcaggggagtgtccctgccacagttctactgctgcccaatcaaggacgccagaaaggtgcaggacctgaaggccgatcactgctggtttacccctaccatctccgccgccttcaactggaagatgcaaaagtacaacatgaacgtgttcggggagctgcagattgccaacgacggatcc

SEQ ID NO: 223 - DNA, 3102 bp, synthetic construct
  misc_feature 1..3102: note = Synthetic sequence or unknown origin
  source 1..3102: mol_type = other DNA
ggtaccgtgaagatcctgggcctcgatatcggcatcagcagcgtgggctatagcgtgatcgagctggacgagaacaagttcaacggcaagtttctggccctgggcgccagaatttttacagccgccgaacagcctaagaccggcgcttctcttgccgctcctagaagagaagccagaagcgccagaaggcggctgagcagaagaagctgccggctgtacaacatcagacggctgctgctggaaaagcagttcatcacccagaccgagatcgccgagatctacgatacccacgagcagctgaccgacgtgtgggatctgagaaaagaggccctgaaccggaagctggacaacaaagagctgtaccgcatcctgatgcacattgccaagcggagaggcttcaagagcgtgcggaagtccgaggaagccaagagagaaggcgagctgctgaagtctatcgccgaaaccaccgaagagttcaagcagggcaagtaccggaccatcggcgagatgtttgccctgaagtacaccaacggcgaggccaagagaaacaagagcggcaactacaacaagagcattgcccgggacctgctgagacaagagatcgagatcatcttcgagatgcagagaaagctgggcagcacaatcgccaacaacgagattgagaagggctacaaagagatcgccttctaccagcggcctctgaaaaccatcgagattaagaccccttgtcctttcgagcccgaagagaagagggcccctaagtgtgcctacaccagcgagaagttcagcgccctgaacaagctggtcaacctgcggctgatcaacgacctgggcgataccagatttctggcctctgccgagatcaaggatgccgtgcgactggccaacaagctgagcaaagtgacctacaagcagctgcggaaagaactgtacctggacgacgagatccggttcctgaacctgaactacacaaagaccgacagcaagggccagcaggtcgaccctgaaacagccgtgctgatcgagttcaagaactaccacagcatccggaaggccctggaatgcaacggcaacctgggcaagatctacttcgacagcatcaaggacgatgaggacttcttcgacaatatcgcctacgtgctgacctgcgagaaaaccgacgagagcatcgaggaaaagctgaaagagtacggctactctgccggcgtcatcgactccatcaaagaactgagcatgagcaagaccagccacctgagcctgaaggccatgaagaaactgatcccttacatgctggacggcaagaagtacacagaggcctgcgaactggccggctacaagaccgaaaaccagaacaccgccaagcagagcctgctgcctgagctgtctcaagaggaactgaccgtgaatcccgtggtcaacagagccatcagccagaccagaaaggtggtcaacgccctgatcaagaagtatggcatcctggatagcatcatcattgagatgagcagggacctgtctaagaccgccaccgagagaagaaacatccagaagctgcaagaagagtttaagagcgagaaagagaaggcccggcagcggtgcctggaaaacggcctgaatcctgacttccccaagagcaacctgctgaaattccggctgtgggaagaacaaggcggcttctgtgtgtacagcggcaagcacatcgaccccaagagactgagcgagcaggactacgtggacatcgaccacatcatcccatacagcagaagcttcgacgacagcctgaacaacaaggtgctgtgcctgaccgatgagaaccggcagaagtccaacaagatcccctacgagtatatcggcgaggacaagtggtacgacttcgtgcagagagtgaagtcctaccacctgaagcagcccaaagtgaacagactgaccaagaagaagtacgagcaagagggcttcaagtcccggaacctgaatgacacccggtatatcgccaagttcgtgaaggattacatcaaagagaacctggacttcggcaacaacctgaaggtggaaaccagaaacggcagcctgaccgccttcctgagaaatcagtggggcctgattaagaaccgggacgagagcgataagcaccacgctcaggatgccgccgtgatcgcttgtagcacccaaggcatggttaagtttctgagcaccgtgtccgccaagctggaaaactacgactacagcaaggacaagaagccccggttcaagcggccctgggagacattcaaccaggacctggaatacgagctgagccgggtgttcgtgtccagagccgccaagaagtctttcagaggggaactgcacgacgccaccatcagaagcgtgaagcacctggataagggcttcaccacagtgaagaagcccatcgagcagattgacctgaaaaccctggaacagatgttcgacaaagagaggaactacaagatctataacctgctcaaagagcgcctcgagcagaacaacaacaaccctcagaaggcctttcaagagcccgtgtacatgcccctgtccaaagagaaagaggccaaggggcagaagccccaccggatcaagagcatcaagattaaggataccggcaccagcggcgtgctcgttagaggcggactggctaagaatgccagcatgcccagagtggacgtgttcaccaaaaagaacaagaagggcaagaacgagtacttcctggtgcctatctacgtgtccgacttcggaaaagagctgcccaacaaggccatcaccagcaagaaggattgctggctggaaatcaacgacgagtacaccttctgcttctcactgttccccgacacactgatcgccatcaatcctaccggcaagcccgaggatgagttcctgggctactacaagaagtgcaacatcagcaacggcgccatcatcctggacagccacgaccggtctatcaaagaaaaaggcttcggctccaagaagctggtctacatcaagaaataccaggtggacatcctcggcgactaccacgaagtgaagcaagaaaagcggctgggcatcaagcccaagcagaaaggccagcagaaagacggcgttggatcc

SEQ ID NO: 224 - DNA, 3114 bp, synthetic construct
  misc_feature 1..3114: note = Synthetic sequence or unknown origin
  source 1..3114: mol_type = other DNA
ggtaccgagaaggtgttcgcctttgatgtgggaaccgcctctctgggaattgccgtgcggaaggacttcgacatgatcagatacgagagcctgctgctgcctcaagaggctggcggaatggatgagctgagagaggccagacggcagtacagaacaagactggcccatgccgccagagaagcctactggaagagaatctgtgaagaggccggcatcgaggtgctgcactctagaatccatggcgacgccagcctgcacattccttctagtcctggcgaccccagactggaaagagagtttgctgcacccggcgacgagacaatctacaccagctgcctgctgcggattaagctgctgcagggcgctaagctggaaggctggcaagtgtttaaggccgtcagatctgccctgcagagaagaggcttcgacagaaacgtgccctggaagaacagagccgccagcaagaccaacgccgacgatgatagcaagaccgccaagaacgccatggaatacgagaagatgctgctcgagatcgtgaaccagcagagagagtatctgtacccctgctacttcgacgccttccagatgggcctgtggaaccccagaaacaaccagatcctgctgcgccccagcaagatcagcaatagagccagaggctacacccctcctagagagctggttattgccgagctgagcgctctgctgcagaatgccgccaagctgtttcctaagctcgtgggcaagatcgatgaggtgctgtggggacctggaaaagagcagtacgccagcttcttcgccgagaagagaaacgccctgcacctgaaagaaggctctgccggcgattgggaaagcctgctgggacagaagatccccagattcgacaacagacagcccggcaagtgcgccctgattcctagatttcatgtgtgccaggccagcgacaccgctattatcgagagcaccttcctgctgaaagtgaagaacctgcgggtgctgagccctgagggcaaagaggtgttcttcagccccgaaaccatcagagtgatcctggacaccgccagaatcaaggccagagccaagagagaggaactgagactggctcaggccgacaaagaggccattcaggctgccgtggccagcgcctacaagatcaccaagaccgacctgaagaaaaccctgcggagcatgaagtacgacatcctgcctggcaacgaggaagtggaagcccctaagatctctggcagagccagactgtctagaccagccgccaagatcatgcgggatctgatcctgtctggcgagagccccagagccttttaccagaaactgctgcagtgccctcctaaggacattcctggcgccacactgagcgacgatctgcagtttctcctgatgatgcccgacagctgggagggcattcacatccctgatatggccggcaagaagatccaagagagcgcccagtctccagacgatctcgttagacagctgatcgccgagcagcgctctcctatcgttagactgcggctggaaatcttcgaccgcgagctgaagagactgctggatgatcctgccatcggcaagcccgaccggatcgtgatggaatttgtgcggggcgatttcctgggcgaagagaagaaacggaaactggaagccgagatcaagcggcggcacaaagagaacctggaaatcagaaccaccgccaccgagcagggctactcttctggaacagacctgctgaagctgaagcttctgaaagaacaggcctacgtgtgcccctacacaggcgacgtgctgtcttgcttcgctctggaagatctggaagtggaccacatcgtgcctagacacggcggcaagaatggcagcgacggctttaccaacaaggtggtcaccagcaggaccaccaaccagctgaaaggcgccagaactccctacgagtttctgcacggaagcggcaagtggaccgcctactgtaacagagtgatggccatgaaggtgtccaagcggaaacagcggctgctgctgtctccagatgccgagaagctggaccagaaatactccgacctgtgcagcacagcctggatcgccagagtgtttagagatatcgccgccgtgcggtgttgttggcctgaaggcgctattggcagcgagagacacatcgtggttatcaacggcgccatcaccgccgctctgcggagaagatatagaatcgactccctgctggcccctgagtgcaagtctgccgatgagatcgagaagaagaaccgggacgacaagagacatcacgccctggatgccatggtgctgaccttcaccaccttttggatgcggaaccccgctctgagagataagctggccctgcctgataagatcgaccggtactacttccaaaagtacatcgacgaagtgaacccgcggaacatcatcttccctagagccggcctggaaaaaaccatctacggcaagagagaaatcgacggccagtccaagatgaccaaacgcgaggatatcgtgtccttcggcatcgacaacaagggcaagttcgtggaaaagtccgtgctgagcaacttccgggacgtgtgtgatgagaagctgcggagctacctgcagaccagcttcgccaatgccaagatcgacagcaccgagaagtggatgttctggtgccagaacctgaagtcccctgacaccggcatgcccatcaagaaagtgcggattgtgaaaggcgggatcgaagagtacaagaacctgagcaaggacggcgacgtgttcggcggacagtatagaaagggcgaccagcacaagggctacttcgtgtacctggataccaagaacaagcccagagtggcccctgtgtatgcccacgcttctgtgtccctggaacgggaaaagctgtgcaagctgggcttcaccgtggtggacttttttcagagcggctgcagcgtggaaatcaaggtgcacgccatcagcggaaagaaccatgtgtccccaggcgtgtacatgctgacctctatctggacacagggcacaatcgccctgttcaagaacggcgagaagtacctggtgtccctgtccagcatctccgatatcgcctccaacctgaagagatgcggatcc

SEQ ID NO: 225 - DNA, 3321 bp, synthetic construct
  misc_feature 1..3321: note = Synthetic sequence or unknown origin
  source 1..3321: mol_type = other DNA
ggtaccgagacaaagcagaccaccaagctgagatacagcctgggcctcgatatcggctctgagtctgttggatgggccgtgatcgagctgaatgagcacggacagcctatcggcctggtggatatgggcgttagagcctttgatgccgtgcggcaagagcagcagaaagccacaacaccagctcaagagcggagagtggccagaagccagagaagaaggctgcgcaacaagaagaagcgcaagaagagactgatcgaggcctgcatcaactacggcctgctgtccaacaaacaagaggccgatgcctgtctggtcaccctgcctggcgataagtctccctgggatctgagagtggaaggcctggaccggaagctggatcggagagaatggttcagagtgctgtaccacctggtcaaccaccggggcttcaagtccttcaagagaggcgaggacctggaaaagggcagaaaggacgacgtgaagaagatgaaggccgctgccaagcagctgagcagcgagtggcgagatagaggctatagaaccgtggccgagttcctgtgcaacgacagcgattggatcagcaagcacggcctgcggaagagaaacaaagagggcagctacgagttcaccatcctgcgggatgatctggtggaagaggccaagctgctgtttgagcagcagcggagattcggcaatgagttcgccagcgccgtgttcgagacagagtacatcgacatcctggacgagaagcccagactgctggaaggcgaggatctgaaggccaaagtgggctactgcaccttcgagcccgatgagagaagggcccctaaagccaccttcacagcccagaagttcagagccctgcagatcatcaacaacctgcggttcatcaaccccgagacaggcgagatcaaagagagcctgaccagcgacgagatcaagcggctgttcaatctggccctgaaccggaaagaagtgaaagccgagcagatcctgagagagctgggactcagaggctggctgattgagggctacgacaagaacaacgagaagatcatcgtgctcgaggacttccacaagctgaaagaggccctcgagaagaagttccccgaaacctggggaaagctgctgaccgacatcgacctgtacgatcaggtggccagcatcctgacctactatctggcccctgagagcaccaagcgggaactgcagaaactgcagctggacgacgaagtgatcgacgccctgctgaacgtgtcctttaagggccatgcctctctgagcctgaaggccctgagaaagatcattccctatctggaacagggctacaagtacagcaaggcctgtgaactggccggctacgatcacagagcactgcccgagaagcaccggcggaatcacatccctccattcgagagcgaagagttcgacaaacagctgaaggccgagtacttcggcatcacaaaccccaacgtgaagagagccctggctcaggccagaaaggtggtcaatgccatcgtgcggcactacggcatccctagcagaatcggaattgagctggccagagagatgaccctgagccggaagcggagagaggaaaccagactgaacaacgaacgccggaaagagcgcgagaacatcatcaagaagctcaaagaggaacacaacgtcgacaaccccagcgccaagctggtggacaagtacatcctgtatgagctgcaaggcggcaagtgcgcctacagcctgaagcagatcgacctgaacagaatgattcacgaccccagctacgtggaaatcgaccacatcatccccagatccatcagcttcaacaacagcttcagcaaccgcgtgctggtgctggcctctgagaatagaaacaagggcgatagactggccgccgagtacgtgaagtcttactacggcgaggaacactacaacaagtgcctggctctgttcgaggaagccctgaagaagcctcacgaccaccggcacagaaagagagaactggctctgaagctcaagctgttcaagaaagagtccctgaccgacgaggaactggtcgagttcagagagagatacctgatcaacacccggcacgccgccagattcttcaaaaaggtgctgtgtgcctacctggacatcgaggaccccagagtgatcaccatcaacggcaccatcaccagggacctgagacatctgctgggcgttgaggacctgaaagaaggcaggttcagcgacaagcaccacgccgtggatgccacaatctgcgccatctgtgacttcagcaccgtgtacaagctgagcaactactacaagtataaggacggcttctacaagatcgacggcgacaccctgatctcccagaacggactgagactgaagctggaagatctggcctggcctagcttccgcgaggatatcgtgaagaggctggaaaccctggtggtgtctcgggccccaaacagaaaagtgacaggcagaggccaccgggacaccatctattccctgaagcacgtgaaaaaggtggtggacctgcctgagaagggcaagatcagcatcagctctgacgcccctagacctaccacaagagtgcggctggattctctgaagcccgaacagatcaaggccatcctggataatcccgagaaggtgctggtggattaccagtccaactacctgctgtacgagcggatcattaagcggctgagagagacagagcccgacgacggcaacaaagaaagatgggctgtgctggctttcggccccgatacagagcctatcagagtgcccagcaaggacggcaaagagggacccgtcgttcggaagatcaagatcttcacagacatcctgagcggcgtggccgttagaggcggaatcgccccttatgacaacatcgtccggctggacttctaccgacggaaagagaagaacggccggtacaagtactacgtggtgcctgtgtatgccgccgacattgccatgggcatcgtgcctgataaggtggccacaacaggcaagcctgagtccgagtggaagaaactggacgacagcttcgagtttctgttccacatcttcaagggcgactgcctgcggatctacaaggatctcaaagaacctcctaccgacatgtacttcaccagcttcgacagaaacaccgtgcggctgaagggcaactatctggacagaagcaacaaaaacaagcaggggaagatcgtcaccgtcgaagagagcatcaccaacgccgctagaatccagaagctgcacgtcgacattctgggcagactgagcgtggtggaaaaagaaaagaaggtgttcggatcc

SEQ ID NO: 226 - DNA, 4125 bp, synthetic construct
  misc_feature 1..4125: note = Synthetic sequence or unknown origin
  source 1..4125: mol_type = other DNA
ggtaccggcatcaagggcgagtactacctgggcctcgatatcggcacaaattctgtcggctgggccgtgaccaacgagaactatcagctgctgagagccaagggcaaagacctgtggggcgtcagactgtttgatgaggcccacaccgccgaggaaagaagaggcttcagaatcgccagacggcggagacagagagagacagctagactgggaatgctgagagagctgttcagcgaggaaatcgacaagatcgaccccggcttcttcgccagactggacgagagcagattccagatgcaagagcgggccgaagagaacaagcagacctacgccatcttcgccgacaaagagtacaccgaccaggactactaccgggactaccccaccatcttccacctgagaagagagctgctgaagtccaaagagccccacgacatcagactggtgtatctggccctggccaacatgttcaagcaccggggccactttctgaacaccagcctgagagccgaggaagataagtacagcttccgggacgcctgccagtttctgtctgatcaggccgaagaagctggcatcaacttcccactgattgagcagcccggcgagctggaaaatctgctgggagagagaggcctgagccggaagaatatgctggaaagagccagcgagctgaccggcatctccaagaaggacaaagaggcctaccacatcctgaagctgatgtgcggactggaagccaagctgaccgatatcttcggcaaagagatgatcgaggaagaacacaagaaactgggaatcgccttcagagccgccgactacgaagagaaggctgaggaaatccggatcatcatcggcgacgagaagttcgagatgatcctggccgtgaaggacatccacgataagggcctgctgagcaacatcatgaagggccacagatacctgagcgaggccagagtggaactgtacgaggaacaccagagggacctgaagaaactgaaaaccgtgctgaagaagtacaaccccgaggcctatcacgacatgttcagagtgatgaaggacggcaactacagcgcctacgtgggctccgtgaatagcagcgacaccgtgatcagaagaaccggcaagggcagaacccaagaggccctgtacaagaccatcagaagcgccctgaaagagctgccccaggacgacctggatgtggtcaacatcctgagcagaatcgaggccgaagtgttcctgcctaagcagctgacagccagcaacggcatcatccccaaccaggtgcacgagaaagagatgcgggccatcctgaaacaggccgaaacctacctgcctttcctgatggaaaaggacgactccgacctgaccgtgtccgagcggatctgccggatcttcagcttccatctgccttactatgtgggcacaatcggccccgagaacagagacagaattgagtaccacggatgggccgagagaaaggcccctggcagaatctacccttggaacctggaagagaagatcgatatgaagggcaccgccaagaacttcatcgagagaatggtccgacactgcacctacctgacaggcgaaagagccctgcctagacagagcctgctgtacgaagagttcgaggtgctgaacgagctgaacaacctgaaactgaacggcgagaagctgagcgtggaagtgaagcaggccatctacaagcacctgttcgagacaggcaagcgggtgtccatgaagcagctcgagaactacctgatcgtgaacggctatatcaagaagggcgagacagacgccatcagcggcatcgatggcgattttcactctagcctgagcagcctgggcaagttcaagggaatcctgggcgaagccgtgcactacgacgagaaccggaagatgatggaagatatcatcttctggggcaccatctacggcaaggacaagagctttctgaaagagagcatctgcgagaattacggcgagtgcctgtccgagaaggatatcaagcgcatcctgggcttcaagttcgaaggctggggcaagctgtctggcagcttcctgaatatggaaggcgtgtccaccgaggacggcgtgatccggaaactgattacagccctgtgggagacaaacgacaacctgatgcagctgctgtctgcccggtacacctatagcgagacactggccgacaagatggaaaccgtggaaaagcctctggccgagtggaccatcgaggatctggatggcatgtatctgagcgcccctgtgaagaggatggtctggcagacaatgaagattttcaaagaactcgagatggtcaccggcggcacccctaaaaagatcttcgtggaaatggcccgcgaagagggcaagaaaggcgtgcggaaagagtcccggaaaaagaagctgatcgagctgtaccaggccatcgagtctgagaaggccctgtggatgcaagaaatcgaggacagacccgagcaggttttccggtccaagaagctgtatctgtactaccggcagatgggccagtgcatgtataccggcgaggccatcaatttcgacgacctgatgaacgacaatctgtacgacatcgaccacatctaccccaggcacttcgtgaaggatgacagcatcgagaacaatctggtgctggtcaagaaagaaaacaacgcccacaagagcgacatctatcctatcgaggaaaaggtgcagcgcgagatgtacagcagatggcggtttctggctgacaagggcttcatcagcagagagaagttcaaccggctgaccagacggacccacttcacagaggaagagaaagccaccttcatctcccggcagctggtggaaacaagacagggcacaaaggccgtgacacagatcctcaagcaggcctttccagccgctgaggtggtgttttctaaggccggcaacgtgtccgacttccggaacaagtacaagctgtacaaagtccgctgcgtgaacgacctgcaccacgccaatgacgcctacctgaatatcgtcgtgggcaatgtgtaccacgtgaagttcacaaaggaccctctgcggttcatcagagaggcccagagataccccaacatggacatctataagtacaacatggataagatctttagctggaacgtcgagcggaatggcgagatcgcctggaccgcttctaaacgcgaaggcgaggatgccggcactatcctgacagtcagaaaggtgctgtccaagagcagccctctggtcaccagaatgtgttctgagaaccacggcggcatcacccggaaggctacaatttggagcgccgagacagccaaaggcgagggctatattcccgtgaagcagagcgaccccagactgcaggatgtgacaagatatggcggactgacagctgtggctggcgccggatatacactggtcgagtataagctgaagggaaagaaagtgcggagcctggaacagctgcccgtgtacctgggaagagtggattctctgaccgaggaagccatgaccacctacttctacaaggccatttgcgaggaaaacaagggcagcgacatcagcgacgtgtgtatccggaagaagttcatcccctacaacgccctgctcaagtacaatggcttcttctactatctggccggcaagaccggcagcagcatcatcatgagatctgccgtgcaggccgtgttctccagcggcgagatgaactacatcaagaaaatcgagaaggccgctgccaccaagtactacgaggaaaaagaccagagaggcgggctgatcctgtccaaggataagaatcaagagctgtacggccggatcaagagcaagtaccagaacacaatcttccagaacaagatgggaaagatgggcagcctgatcatcaatggcgaggaacagtttggccagctgatgctgagcgatcagtgcgccgtgctcatggaaatcatgaagaactttaacaccggcgacggcgtggacatgaagctcatcggcggaaaagagaaaacaggcatcaccaccatcaacaaagtgatcagcaagagcgaggaatgcatcctgatccaccagagcgccgctggcctgtttgaagccgagattgacctgctgaaagtgggatcc

SEQ ID NO: 227 - DNA, 4479 bp, synthetic construct
  misc_feature 1..4479: note = Synthetic sequence or unknown origin
  source 1..4479: mol_type = other DNA
ggtaccaagaacatcctgggcctcgacctgggcacaaattctattggatgggccctcgtgcagaccgacgacgagggaaattacaccagccagatcaagatcggcagccggatcatccccatgacacaggatgtgctgggcaagttcgatagcggcgtgacagaatctgccgccagagagagaacagagtacagaggcgtgcggcggctgagagaaagatgcctgcagagaagagaacggctgctgagagtgctgcacgtgctggattttctgcccgagcactacagcagccacatcggctgggatagcaccagcaatgccacctacggcaagtttctggacgagagcgagcccaagatcgcctggaagagaaacaaagagggcaagatggagttcatcttcatggacagcttccaagagatgctgaacgacttctccatccaccagcctgctctggtggccgatggaaagaagatccctctggactggaccctgtactacctgagaaagaaggccctgagcaagcccatccggaaagaggaactggcctggattctgctgagcttcaaccagaagcggggctactaccagctgagaggcgaggaagaggaagaaaagaaagaaaaccggctggaagagtacttcaagctgaaagtgatcagagtggaagccaccgacgagaagaggggcgacaacgtgtggtacaacgtgcacctggaaaatggctggatctacagaagggccagcagactgcccctgaacgattgggagggaaaagtccgcgagttcatcgtgaccaccgatctggaaaaggacggcacccctaagatgaacaaggacggcgaagtgaagcggagcttcagaagccctaaggacgacgattggggcctgcagaagatccggaccgagagagatatcgacgccagcaacaagaccgtgggcgagtacatctacgacagcatcctgtctcaccccagccagaaagtgcggggcagactcgtgcggaccatcgagagaaagttctacaaggacgagctgcgggccatcatcagcaagcaggccgagtttatcagcgagctgagcgacagcgtgatgctggaaaagtgcatcaacgagctgtaccccaagaacgagggccaccagtccagcctgttcagacacgacatgagctactttctgatcgacgacctgctgttctaccagcggcctctgaagtccaagaagtccctgatcagcgattgccccatggaaaactacgagtacgtggaccggaacaccggcgagattaagattcaggccatcaagtgcgccgccaagagcaacccattctttcaagagttccggatctggcagttcatccagaacctgcggctgatcgacagaagcggctttcaagaaaccgacatcaccagcaagtacatcagcaccgaggacgactacgtgcggctgttccactggctgaacgatcaagagaaagtgacccagaacaagctgctgggcgactacttcaagatcaagaagcccaagggcaaagacgccagctatcccctgagatggaactacgtggaagataaggactacccctgcaacgagacaagatacgacatgctgcaggccatcgagaaggccggactgtgtcctgctctgatcagcaagagagaggacgagtatcggctgtggcatctgctgtactccgtgaacgacaagaatgagctgcagaaagccctggaaagctacgccaacagcggcggaagaaacctgcctgagagcttcgtgcgcgagttcctgaagatcaagcccttcgagaaagagtacgccagcttcagcgagaaagccatcaagcggctgctgtccctgatgagatacggcagcatgtggaacgaggaagccattgacgacaagaccaaagagcggatcagaaacattctggccggacacctggaacctagcatcagcgagagaatcagccacgccggctttcacttcgagaagatcgaggatttccggggcctgcctctgtggatcgcctcttacattgtgtacggcagacacgccgagagcagagacaccgacaaatggaacacccctcacgagatgatgagctacatcagaagcttccggcagcacagcctgagaaaccctgtggtggaacagtgcattctggaaaccctgagagccgtgcacgacctgtggaaagaggtggaccacatcgacgagattcacgtggaaatgggccgcagcatgaagtccaccgtggaccagcggagaagaatgaccgagcaagtgatccgcaacgagaacaccaacctgcggatcaggcagctgctgcaagagctgaagaacgacgacaacatcaaggacgtgcggccttacagccccatgcagcaggacatcctgagaatctatgaggaaggcgccctgtctaccctgaagaaggatgacgaggactacgccgagatcacccggatctctagactggcctctcctacacagagcgagatgctgcggtacaagctgtggctcgagcagaagtactgcagcccttacaccggcagacctatcagcctggccaagctgtttaccaccgcctaccagattgagcacgtgatccccaaggccagattcttcgacgacagcttctccaacaaagtgatctgcgaggccgaagtgaaccagctgaagtctaacctgctgggctatgagttcatcaagaagaacggcggccagatcgtgcactgtcctacactgggagatgtgtccattctgaaagaggatgagtacaaggcctttatcgccgacaattacagcagcaaccccaacaagaaacggaagctgctcatggacgacatccccgaagagtttatccagagacagatgaacgacacccggtacatctcccggttcatcctggctctgctgtccaacgtcgtccgcgacgaggacgaaaaagagtacacctccaagcacgtcatcccttgcaccggcggcatcaccgacagactgaagaaagactggggcctgaacgacgtgtggaatcacatcgtggcccctcggttccagcggatgaatgatctgacccacagcgacctgttcggccactgggaagataagaacggcaagagagtgttccagaccgatatgcccctggaactgcggagaggcttcagcaagaagcggatcgatcacagacaccacgccatggatgccctggccattgcctgtgcctctcggcagatcatcagctacctgaacaacgagaatgcccaggacaccgagcggagatacgatctgagagccaaactgtgcggcaagaaccagctcctgctgaaaccctgggacacctttactcaggatgccgaggccgctctgcagaacatcgtggtgtccttcaagaactatgtgcgcgtgatcaacaaggcctccaactactaccggcactacgacgagtccggcagaaaagtgatggtggcccagaccgccaatgatcagtgggccgttagaaagcccctgcacaaagaaaccgtgtttggccacgtgaacctgaagcggaaaaaagaggtgcccctggccaaagctctggaaaacccagacgtgatcgccgataagaatctgcggaaggccatccagggaatgctggccgctggcatgacaacaaagaaggtgctccagcacttcaaggacattctgttcagcttcgagggcaaaaacatccagaaagtcgaggtgttctacttcaccgacgacaccgaagtcatggtggctaccagaaaacccctggacgaaaccttcgatgagaagcgcatcaaggatatcaccgataccggcatccagaagattctcttcaactacctgcagagcaaaggcggcgaccccaaagtggcttttagccctgaaggcatccagcaaatgaacgagcagatcgccctgtacaacaagggcaagaatcaccagcctatcctgagagtccgggtgtccgagcctagaggcgagaagtttcaagtgggccagaccggaaacaagacccggaaatatgtggaagcccagaagggcaccaatctgtacttcgccatctacctggacacagagggcaaccgcagctacagcacaatccctctgaatatcgtggtggaaagactgaagcagggactgagccccgtgcctgaaaccgacgaaaagggcaacagactgctgttttatctgagccccaacgacctggtgtacgtgcccacagaggaagagagggaaaaccccgacatcagcatcgacaagaaccggatctacaagatggtgtccgccaccggcaacgagtgcctgtttatcaagagcagcgtggcaagccccatcgtgaacaagcaagagttcggccctctgaacaaagtgggcagatctatcgagaacgactgccccatgatcaagaacgtgtgctggaagattgtggtggaccggctgggcaacatcatcaaagtgattcggggatcc

SEQ ID NO: 228 - DNA, 3171 bp, synthetic construct
  misc_feature 1..3171: note = Synthetic sequence or unknown origin
  source 1..3171: mol_type = other DNA
ggtaccagccggaagtatggcatcggcctggatatcggcatcggctctgtgggctttgccgtgatcagccggacaaacaaagaggacgccagaatcgaggacctcggcgtgcgactgtttgacagcggcgagacaaacgaccacaaggccagaaagagccaagagagaagggcccacagaagcgtgcggagactgatcagaagaagggctcaccggaaagagcgggtcaagaacttcctgcagaagatcaacctgatcagcaacgacaagctgaaggcctggcaagagcagaacggcaaccagaatattttcgccgtgcgcctgaaaggcctggacgccaaactgacacctgaggaaatcgccgactgcatcatccacatctgcaaccaccggggctacagagagttctacgaggaagagagcaccgacaaagaggccggcgttatcaaacaggccctggccgagttcgagcagagattccaggacggcaattaccgcagcgtggccgacatgattctgcacgacgaggtgttcaagaccgagacagcctttcctgactaccacaaccacaaagagagcgagcggcacatcctgatcaagcgggcctacctggaaaaagagctgctggaaatcctgaagcaccagcagaactactaccctcagctgaccgagcacaacatcgactttctgtgcaacaagatcgtgttcgcccagcgggattttgagacaggacctggcgaacccggcaagatgctgaatagaaagaccggacagaaagaggaacagctgcggaagttcctgggcttcctggatagcatcggcaagtgcatgttctacaaggacgagaagagggccttccggtctaccgtgctgtctgatgtgtacgccctgatcaactgcctgagccagttcacctacgtggacgtggaaacaggcgagatcgtgctgcctaaagaagccgccagcgtcatcctgaaagaggtgctgattaaggccagcgccacagagaaagagctgaaagccctgctgaagagattcggcatcgagatgatcaagcccggcaagctggaagtgaaggcccctgataccatcaagaccctgaagatcctgaaggccacactggaagccagcggctacaattacgaggaactgatcgccgaggaacagttcgatctggaaaaccccagcaagctgcagcggctgtgtgtgatcctgagcgagaacatcacccctaagcggagagagagagccctggaaagagaaggctggaacaagaaactgcgcgaggaaatgaagcggaagaagtttggcggcacagccagcgtgtgcgagagatatatggtggaagccatcaacgcctttctgaacggcgaaacctacggcaacttccaggccagacggctgcaagagagagaagaagccaccgagatcaagaccaagtacaagacactgcccgctctgaccaagaacaccgacgaagagatcatcgagaacgtggtggtgtttaaggccatcaatgagacacggaaggtgctgaacgccatcatccggaagtacggctccccagagtacatcaacgtggaagtggccgatgagctgggcagaagcttcaaagagagggacaagatcagcaagatgaaccgggacaacgagaaagaacggaagcagatcgtggataagatcgtgcagctgggcctgagaaacgagggcgaagtgaagaacaaggacatcctgcggttccggctgtggaaagctcaaaacggcgtggacctgtacaccggcagacccatcgaagagaatgaggtgctgtccgagatctacgaggtggaccacatcgtgcccttcagcctgatcctggacgacaccatcaacaacaaggccctggtgtcccggaccgccaatcaagagaaaagacagcgggtgcccagagagtacctggccgacgacgaagagtttatgaagagagtgaacaccctgttcaacaagggcaagatctccgccaagaagtacaagtacctgacactcgagagcctgtacacacctcaggccaggctgctgctcgaggaatggaagtccagaaacatcaacgacacccgctacatcacccggtacatcgtgaactatctggccggcaacctgctgttcgacagcgacaaggccaagaacgtgtacgccatcaagggcgccatcacctccaagatgagaaagctgtggctgaacagcaagagctggggcaacgccgagaaggacagagagaacaatctgcatcacgccgccgatgctgtcgtgatcgctaatctgacccctgcctatgtggaaattgccagcgacaccctgaagctgcagagcatctataaggcccaccacaagcaagagagcttcgagtacaccacctacctgaatggcgccgtgcggaagatggaaaagtactacggcttcaacgaggcctactctcggagactgctggaagctaagggcagaatccctagcctcgtgcggaatctgtacgccgaagtggacaagagactggtggacaacagcctcgagttcttccaggatgtgacctgcgagcagttcgtggccaacgtgaaggactactaccgggacgatcagatcttcgccgagtctctgagcatgcctctggtgtcctacaagcagaacaagaagttccagggccagatcaccgacgacaaccctgtgaagcagagccagcggaaggacacctctatcgccaagctggataccctgggcaacgagaatgtgctgagcgccaacaagtactactgcattgagatctaccgcgacaaacagaacaaaacggccctgcggggcatcagatacgtggacctcgtgaagaagaacaaaaagctgtacctggctacccctctgcctgagaactacaaagaacacgtgatgtacctgttcgccaacgactacgtgcggatcttcgacggcaacaacaaactgaagttcgagggctactatcggtccaccaagaatgtgaaccggaatctgctgtacatccggaacaacaacgtgaacagcgacgtgatcgtgtccgtcaccaagaacgacaaagtgatcaagctgaacgtcgacatcctgggcaagctcggcggagaagtgaagtgctccgtgccttttatgctgctgagcgaaaaggacggatcc

SEQ ID NO: 229 - DNA, 3171 bp, synthetic construct
  misc_feature 1..3171: note = Synthetic sequence or unknown origin
  source 1..3171: mol_type = other DNA
ggtaccaccaattacaccctgggcctcgacatcggcatcacatctgttggctacggcctgatcgacaccgacaccaagtctgtgatcgatgccggcgtgcggctgtttcctgaggccaacgtggaaaacaacgagggcagaagaagccagagaggcgccagacggctgaagcggagaagaatccaccggctggaaagagtgaagcggctgctgagcaactaccacctgatggaagagagcaaccctcctcacagcacaaacccctaccagatcagagtgaagggcctgagagaggaactgagcaaggctgaactggccgtggctctgctgcacattgccaagagaagaggcatcgacaacatgagcgtggacgccgaggatgatgccccttctgatggcgtgtccacaaaggacgtgctggccaagaatgccaacgagctgagccacaaatacgtgtgcgaactgcagctggacagactgctggctgagggaaaagtgcggggcgagcagaacagattccagaccaaggacctgatcgaggaagtgaaacagctgctgaccacacagaagaactaccacaccttcgacgacgagttcatcaaccactacatcaagctggtgcagcagcggagagcctactatgaaggacctggcgagccttctccttacggctggggcggaaacctgaaagaatggtacgagatgctgatgggccactgcacctactttcccgatgagctgagaagcgtgaagtacgcctacagcgccgacctgttcaacgccctgaacgacctgaacaacctcgtgatccagcgcgacggcgtgccctacctggaatacttcgagaagttccacatcatcgagaacgtgttcaagcagaaaaagacgcccacactgaagcagatcgccaaagaaatcgacgtgacccctgaggacatcaagggctacagagtgaccaagagcggcaagagcgagttcaccaagttcaagatctaccacgacctcaaggacatcctgacgcacaaagagtacctggaagataacgatctgatggacgaaatcgccaagatcctgaccatctaccaggacagcgagagcatcaaagaggaactcgagaaactgaccgagctgttcaccgaggaagagaaagaggccatcagccagctgagcagctacaccggaacacacagactgagcctgaagtgcatcaactacgtgctgcccgacctgtggaaaaccccttacaaccagatggaactgttcacccagctgaacctgaagcctaagaaggtggaactgaagaaccagaatcacatccccaccgagatcgtggatgagttcattctgagccccgtcgtgcggagaagcttcatccagtctatcaaggtggtggacgctgtgatccagaagtacggccagcctaccgacatcatcattgagctggccagagagaacaacagcaaagagcagcggcagtttatcaacaagctgcagaagcagcacgaccagaccagacaccggatcgaagagatcatgaagcagtacaacaacgagaacgccaagtacctgttcgagaagatcaagctgcacgacatgcaagagggcaagtgcctgtacagcctgaaggatatccctctggaagatctgctgcggaacccttaccactacgaggtggaccacatcattcccagaagcgtggccttcgacaactctctgaacaacaaggtgctcgtgcggcaagaagagaacagcaagaagggcgccagaacaccctaccagtacctgaatagcagcgacgccgtgatcagctacaaccagtttaagcagcatgtgctgaacctcagcaagagcaaggaccggatgagcaagaagaagcgggactacctgctggaagaacgggacatcaacaagttcgaggtgcagaaagagttcattaaccggaacctggtggacacccggtacaccaccagagaactggccaacttcctgaaaacctacttcaagatcaacaacatcgacaccaaagtcaagaccatcaacggcggcttcaccaactacctgagaaaagtgtggcggttctccaaagagcggaaccacggatacaagcaccacgccgaagatgccctggttatcgccaacgccaactttctgttcaaacagcacaaggccctgaaagaggctgagaaggtcctgaacaatcccgccagcaaggacgagagcgccatcgatgtgttcaacgacaaccagtacaaagaactgatggccaaaaacagcgtggtcgacgagatcaaggactttaaggacttcaagttcagccaccgcgtggacaagaagcccaacagacagctgctcaacgacacactgtacagcacccggaacatcgataaccacgactacatcgtgcagaagctgaccaacatctacgacaaggacaacaaagaagtgaagaagatcgtcagcgagaagcccgagaagctgctgatgtaccagcacgatcccaagaccttcaagaaactgcagaccgtgatggaccagtatgccgaggaaaagaaccctctggccaagtactacgaggaacacggcgagtatctgaagaagtatgccaagaaaggcaacggccctgccatcaagtccctgaagtacatcggcaagaaagtgaacgcccacttcgatgtgaccgacaagtaccccaatcctaagaacaagctggtcaagctgagcctcaagagcttccgcttcgacatctacaagggcgagtccggctataagatgctgggcctgagctacctggatgtggaaaagaaggacgcctactacagaatccccagcgagtattacgaagaactgaaaaagaagaaaaagattaacgagggcgacgagtttatcggcagcttctacaccaacgacctcatcaaagtgaatggcgagaagtaccgcgtgatcggcgtgaacaactccgaccggaatatcattgaggtggacatgcccgacatccggtacagagagtacctcgagcttaacaacaaaaagggcacccctcggatcttcatcaccatcgggaagaagattaacaccatcgagaagtatagcaccgacatcctgggcaacctgtacaagaacgagcggcccaagaagcctcagctgatctttaagaaaggcgtcgagggatcc

SEQ ID NO: 230 - DNA, 3198 bp, synthetic construct
  misc_feature 1..3198: note = Synthetic sequence or unknown origin
  source 1..3198: mol_type = other DNA
ggtaccgcctctggcgaaaagtctcagctgggaatccacctggatgtgggccacgattctatcggatggtgcgtgaccagaaccatgcctggcgacgagaagtttctggccattcctggaaccggcgtggtgctgtttcctgccgatgattgtctggccaaccagcggagagccttcagaaggcagagaaggcacatccgggccaccagacagcggatcgagagaatgaagtccgtgctgctggacatgggcgtgatgacagagggcgagctgaagagaaatctgaccgccgctccttggaaactggccgctcaagtgctgaccacaggcaagactctgtcttggcctgaactgtgggctgtgctgcgttggtacgcccacaatagaggctacgatggcaacgtgctggcctctctgagaagcggaagaatggtgtccgccgaggacatcgagaaaaacgccgctgccagagaactgatggccaaatacggaaccgccagcatggccgagacaatgtgccactacatgaagatcgagcccgacggcaagatcattgccagcagagagagattcaaaggcctgggcgtgtccttcgaccggtcctgcgttgaaaaagaagtgcggcagatcctgctggtgcacaagggtgttctgaaaggcgtggacgacgccttcgtgcatctgctgatggcctctccagtgaccgagcctcactacctgagaaccgtggaaaagctgcccttccacgtgccaaacagatactggggcggagtgctgtttggacagctggcccctagattcgacaacagactgatcggcgcttgtcccgtgacaggcgagaaactgcctggaaaggccaccagcgagtttctgcggttcagattcgccatgatgctggcccacgtccgcgtgggatctgattctagacctctgacagccgacgagcggggcagaatctataaggccgctaccatgtgcggcggcttccagaagggctccttcaagaaaatcgtggacgaagtgaccggcgaggacgtgaccaatatcgatgctctgctgacagcccctgaggccgataagtctctggtgctgtaccctggcctgttcagcctgaccaagaaaggactggacgccttcatcgagtctcaggctctgagaaccctggccaacaagctgttccggggcaagagaatgactgtgggcgacgtgatcgcccagattccagccgataagcaagaggatgccaaggccgctctggccaagaacaccagaaagggcaagaaagccttcgatcccctgtccgatgccattgtggctgagttgcctagcggcagagccccttatgccagatctgtgctggttaaggctgccgaagcagtgctgagaggcgaggaccctacagagaaaggcggcatcctgtaccgggacgccaccaaagaagatgtgctgaaagaggaagatatcgaccgcgagacaaacaaccacctcgtgcggcacagagtgaagattctgctgcggctgctgagagacattgtgcacgactacgccgagaacaaccctgctcaggtggcccaagtgacaatcgagatggcccgggacctgaaagaactgagcggcatgaccaacaagcagatcgtgtccgagatgtacctgaaaacagcccaccaccggaacgccgccaagaaactggctgaactgctgcattgtgacgctgccgctgtgtctgccggcctcgtcagaaaaatgagaatcgccgaggatctggacttcaagtgcccctacaccggctggaagttcgaccctatggacgtggtgcataagaacgtggacctggaccacatcctgcctagaagccagagagccaccgacagcctggatagcatggtgctgaccttcaccgaagtgaaccggatgaagggcgccagaaccggcctggaatttgtcagagagtttggcggccagagagtgaacggcagagacaacctggaagtgtttgacgagaagcggtacagagacttcgtggacaagctgagaatcgacagataccccgacgacaagaagcggcagaagcggagacaagagaagctgctgaagctgcacagcgaggatgtgggaatgaccgagggcatgctgacccggaccagctatatcaccacactggccaccaaggctatccggggcttcttcgccaattgcggcagaatgcccagaatcatcagcgtgccaggcagagtgaccgccgagctgagaaagcagtgggatattctgggactgctggccgagagcgaccctagagtggttgatgagaatggccggctgagactgaagcaagagatccggggaatcacccacatgcaccatgccgtggatgccattacactgggacttgccgctacactgctgcctaccgatggcaccttttgggccatgatgtgcaagcggcgcgtgaaagaagaggaaaagaggctgctggcttccaccggcgccttccagtttacagcccagaacgagcccagactgattgagctgcctccttacctgagacaggccatttctggcgctctggctgagcagagagtggtggttcaccagcctcaagaaagagccggcctgaaggtccagcagaatacctggggcatcgagaagatcgaaaatggcatggtgtacatccggcagcggagcagagatgagaaaaccggaaagatcgccgtgaagcacgacagcgtgaccatcgataaggccttcggcatcaagcccaccaacggcaatggaaagctgcaggccattaagggcgtcctgctgcctgatgtgaatttcggagtggccctgctgaaggaccccaagttcgtcagacatcagagagtgtggaacgagctggccatcgtgaaggacgagaatgagggcagactgccttgtcttgtcagaagaggcggactgatcagagtggccaccggcaatttttccggcgtttggagagtggcctccgtgaaggataataccagcggaatcgccctggacatcgtgcggcctaatgccgtgaaagtgcagaacggcgtggactatgccaagatcaacgtgaagctgagcagcctggtcaaggccggactggatgtcgtgaagcagacctatacaggcgtggccctgtgtcctatcacctctctgaccagcagacagaccggcagcagatctcaaggatcc

SEQ ID NO: 231 - DNA, 3204 bp, synthetic construct
  misc_feature 1..3204: note = Synthetic sequence or unknown origin
  source 1..3204: mol_type = other DNA
ggtaccgagaagcggatcttcggcttcgacatcggaattgccagcctcggatgggccgtcgtggacttcgatgatacagccgatcctgagaacaacatctaccccaccggcaagatcgtgaagtccggcgtcagatgcttccccgtggccgagaatcctaaggatggcaagagcctggcctttcctagacggcagaagcggctgcagagaaagctgtgtagacggaaggccagacggatggccggaatcaaagccctgtttgtggccaacggcctgatcgacagagccagcctgttcgacgagaaagagaacatctacaaggccagagacaaggccgacgtgtgggatctgagagtgaaggccctgacagagaagctgaccaccgtcgagttcatcagagtgctgacacacctggccaagcaccggggcttcaagagctacagaatcgtgcaagagaaggccgacaaagaaaacggcaaagtgctggccgccgtgaaggccaatagagccctgctggaaaacagcaagacactggcccagatcatcgtggaaaaaggcggccctaagcggaacagagatgacagagagggcaacagcacctacgagaacagcatccccagggacgagatcgagagagaggccaagctgatcttcgagaagcagagagagctgggcctgacagccgccacagaaaagctgcagagggatttcgtgggaatcgccttccggttcagagagatcaacggcaagaaaatcgagaagatgatcggcaagtgcctgtttgagaaggacgagcccagagcacccaagaatgcccctagcgccgaatttttcgtggcctggaccaagatcaacaactgccacgtgcgggacaacgacggcaagctgagatttctgacccaagaggaaaaggacgccgtctttgagctgctgaagaacaagaaagaagtgaagtacgccgacatccacaagaagctgttccccaacagacccgacatcagattcgccgacgtcgagtacaaccccaagcctgtgttcgacaaaaagaccggcgagatcaaagagcccagcgagcctgagagcctgaagttctttgccctgaaaggctggcacgacctgaagtccgccatcgatgtgtccgcctatcctaacgagtggctggataaggccgtgaccgtgatcgccacacagaagaacgacgccaacatcagcaaagagctgaagaatctgggcttcagcgccagcgacgccgaaaatctggctggcctgagcttcagcaagttcatctccctgagcctcaaggccctgtacaagatcctgcctgagatgcaggccggcaagaagtataacgaagcctgcgaggccgtgggctacgatttcaaaagcacaggcgagtccttcgccgtgcagaagggaaagttcctgcctcctattccagaaagcctggccaccaccgtgcctgtggttaatagagctatggcccagttccggaaggtgtacaacgccctcgtcagagagtacggcacccctgaccagatcaatgtggaactggcccgggacgtgtacaacaaccacgatgagagaagagagatcgccgccaagcagaacgagtatgccgaagagaagaagaaagtcaaggccagcgcctgcagcaagctcgaactggccgatatcagcggcagggacctgctgaagttcagactgtatgagcagcaggacggcaagtgtatctacagcggcgagaagctggacctgcggagactggtggaacaggattactgcgacgtggaccacatcatcccttacagcagaagcctggacaacagccagaacaacaaggtgctgtgcctgtccagagagaaccggcagaagtccgataagacccctctcgagtacatcacagaccccgtgaagcaggccgagtttatcgccagagtgaagtccatgaagggcctgggcagcaagaagcgggacagactgctgatccgggacttcaacgagaaggatgtggacttcagagagcggaacatcaacgacacacggtacatggcccggtacatcatgaagtatctggacgactgcatcgacttcagccagtccaagaccgacgtgaaggacagagtgcaggccagaaatggcgccctgaccgattttctgagacaccagtggggcctgaagaaggatagaagcgagagcgacaagcaccacgctcaggatgccattgtgatcgcctgcgccaccaacggctatacccagtatctggcccacctgagcaagatctttgagaacaagcaggcctacgccaacaaatacggcgagccctggtacaaggccttcaagcagcatgtgaagcagccctgggacggcttctatcaggatgtgcaggcctctctggccgagatctttgtgtcccggcctcctagaaagaacgccaccggcgaaatccaccaggacaccgtgcacacactgaaccccaagaaaaagaacagatggggcgagctggtgtacagcgccaaggatgtgaagtctggcctgaacgttcgcggcggaatggccggcaatagcaacatgttcagatgcgacgtgttcgagaaaggcggacggttcttcatcgtgcccgtgtacctggccgacttctgcgagaagaacagaagcgactgcttctgccccaaggacaaagagcacgagaagcccgacgaaacctacaagttcctgttcagcgtgttcaaggacgactacctgagcatcgagacaaacaagggcgagaagttctacggctacatgaaccagtatatcaccagcaccggccagttttacatcggcagcaacgacagcagccccatgtacagcatcagcaccagcagctttgagaagcaggacatcctgctgtaccggatcggagagaagttcgagaagtgcagcgtggtggactttgacagcgagaagcaagaaatgaaggtggccagcctggaagatggcagcattcacaagatcaaggcctccgccaaagtgaacaagaagggcgaaacccagaagatctataagaccgacaagccctacgaaaagctggacaagggcaagaccatcagcagcgccacctttaagcggatcagaaagtaccaggtggaccctctgggcagatacgtggaagtgaaaagcgagatcagactgcccctgaacatcaagaaaggcaagagcggatcc

SEQ ID NO: 232 - DNA, 3225 bp, synthetic construct
  misc_feature 1..3225: note = Synthetic sequence or unknown origin
  source 1..3225: mol_type = other DNA
ggtacctacagactgggcctcgatatcggcacaacatctgttggctgggccgtgctgaacaccaacaacgacgccgagcctaacagaatcatcgacctcggcgtgcggatcttcgatgccgccgagaatcctaaggatggcagctctcttgccgctcctagaagagatgctagaggcgccagaagaagaaaccggcggcaccggcaccggatggaaagaatcaaagccctgctggtcaacagcagcgtgctgaccaaagaggaactgaaggacctgtacaacaagaaagagctgatcgacatctaccaagtccgctacgaggccctggacagagccctgacaaatgaagagttcgcccggctgctgatccacattgcccagagaagaggcttcaagagcaaccggaagaacgaggacaagaagtccgacagcggcaagctggtcaccgccacaacagagaataccgagtacatggccagcaagggctacagaacagtgggcgagatgctgtacctggacgagaagttcgcccacaacaagcggaacaaaggcggcgactacagcaacaccttcctgagaagccagctgaccgaggaagtggtcatcatcttcaaccagcagaagctgttcggcaacagattcgccgacgacgtgctgctgacaaagtacaccgagatcctgctgagccagcgggatttcgatcagggccctaacgagccttctccttacgccggcaaccagatcgagaagatggtcggagagtgcaccttcgagaagggcgagaagagagcctctaaggccacctacagcttcgagtacttcaacctgctgcagaagatcaacgccatccggattcagagccccgagggcaaaagaaccctgaccgccgacgagcggaacagaatcgtggaactgtgccacaagaccgagaaggtggaataccggcacctgagaaacgccattcctctggaaagctacgagcagtttgccaacctgagctacggcgacaagaccaccgaagaggtggaaaagaccaagttccagtacctgaacgcctaccacgacatgagaaaggtgttcgacaagctgagcaagggccacatcagcaacatcagcgtgaagcagcgggatgccattgccaccgctctgacctactacaaaaccgacgagaagatcatcagcgccctggccgacatcgagctgtcccaagaagaactgaacgtcgtcctcgagctgaagaactactccaagttcggcaatctgagcgtgaaggccctgaacaagatcatcccctacctggaacagggctacacctacgataaggcctgtggcctcgtgggctacgatttcagaggccacaccgacagctacaagagcaagtacctgcctaagctgcccgacgatatctacgacatcacaagccccgtggtcaagagagccgtgaaccagaccatcaaggtggtcaacgagatcattcggagatacggaagccctgccgccgtgaatattgagctggccagagagatgagccggtccttcaacgaccggaaagagattgagaaggcccagaaagagaacgccgacaacaaccagaagatccgggaagagatcaaggacaccttcaagattctgagccccaccggccaggacatcatcaagtacagactgtggaaagagcagcaagaaacctgcctgtacacaaacagccccatcaaggccgagctgctgtttagccctggctactgcgagatcgaccacatcatcccttacagcatcagcttcgacgactcctactccaacaaggtgctggtcatggcctacgccaacagagagaagggcaacagactgcccctgcagtacgtgaagtccaaggacgatttcatcggcctggtcaacgccttcatcaagaacaaggccaagaaacagaagctgctcaaagagtacatctccgtcgaggatgagaaccagatcaagcagagaagcctgcaggacacccagttcatcacccggttcatgctgaactacatccgggacaacctggaatttgacagcgcctactccggcaaagtgaaggtgcaggctgtgaatggcgccgtgacagcctacatgaggaagagatggggcatcagcaagttcagagaggacaccgacaagcaccactgcattgatgccgtggtggtggcctgtatcacccctggcatcatccagaaagtgacccggtacagcaagcgcaaagagaactactacaacgaccgcgacattgagctgaacaacgagcggtttcctctgccttggcacgagttcaaggacgagatcgatgcccggacaatcgccaatcctgctgctctgctggccgagatcaatctgcccaattacatgggcgtcgacatcgaaaagatcaggcccatcttcgtgtctcggatgaccaagaaaaagaccagcggacaggcccacaaagaaaccatcagagcctggcgggacgtgaccattgacggcagaaccgagaagaaaaccgtgaccaagacagccctgcagaacctgaagctggacaagaacaatgagatcgtgaattactacaaccccagcagcgacagactgctgtatgagctgctgcgggataagctgatcgccgctggcggcaacggaaagaaagcctttcctgacggctacatcctgaagcctgctcctaaaggcggagtgcagagcaaggtgcagaaagtcaagatctacgataccagcagcctgaacgtgtccgtgaatgatggcgtggccgccaatggcgatatggtccgaatcgatctgtacaaggtggaaggcgacggctactacttcgtgcccatctacgtggccgacctgatcaaagagaagctgcccaacaaagcctccgtggccgctaagagctacgccgagtggaaagaaatgaaggacgaggacttcctttggagcgtgtaccccaacgacctgctgtacatcgagcacaaaaaagagatgaagttcaccaaggtgttcaaagacgcccggatcaacaacgaaatgttcgccaacaaagtgttcgtgtactacaacagcgccgacatcagcaccggcagcatcaagatcattaccgacgacaatggctacatgatcagaggcctgggcatcaagaccatctccaacattcagaaataccacgtggacgtgctgggcaacaagtacaaggccgaaaaagagtcccggaagggatcc

SEQ ID NO: 233 - DNA, 3228 bp, synthetic construct
  misc_feature 1..3228: note = Synthetic sequence or unknown origin
  source 1..3228: mol_type = other DNA
ggtaccagatacaccatcggcctggacatcggaatcgcctctgttggatgggccgtgatcaacaacgacgagaacagaatcgagaacctcggcgtgcggatcttcaagaaggccgaagatcctaagaccggcaagagccccaacttcgacagaaggctggccagaggctctcggagaaggcttagacgcagagccatcagaatgcagaagatcaaggacctgttcctgaagtacggcctggtcaacagcgaggaactgaagaacctgtacaccatcaacgagagcaccatcgacgtgtgggagctgagagagatcgccctggacaacaagatcgaccggaagtcctgggccagaatcctgacacacattgccaagcggagaggctacaagagcaaccggaagatcgacatcgaggacaaagaagtgggcaagctgagcaagggaaccatcgagaacaagaagctgctggaagagaacaactaccggaccatcggcgagatgttctacaaggacgagaagttcaagaccaacaagcggaacaagagcggcgagtacaccaacaccgtgctgagatccatgctggtggacgaagtgaagatcctgttcgccaagcagagagagtacggcagccagtacgccaaagaagagttcgagaaagagtacatcgatgagatgtgcttccaagagaagtacctgacagaggaactgctggaaaagatgctgggcaagtgcaccttcgaggaaggcgaagttcgggcccctaagaacagctacacctttgagcggttcatgctgctgcagaaagtgaacaacctgcggatcgacatgctgggcgaagagatcaagctgaccgaggaacagcggatgaagatcatcgagatggcctacaagcagagcgaagtcaagtacatccagatccggaagctgatgcagctgcccgagaaggccaagttcagcgacctgaactactacatccggaacaacaagaccgatcagaagaacgaagaactgagcgagagcgacttcaacaagaagatcgaggataagaagttcgtcaagctggacggctggcacagcatcagaacagccctgaacaagattgacaaggccgaaaagtttaagctgctcgaggccaaccacgacctgcagaacatcattgctgatgccctcgtgcggaacaaaaccgacgaggacatccagaagtatctgatcgacagaaacatcgacctggacctgatcaacgccgccaaacagatcagcttcagcaagttcggccacctgtcctacaaggccatgaagaatatcatccccgagctggaaaaaggcctgacctacgacaaggcctgtgaagaggccggctacgactacaagggcgaagaaaagaccaagcagtacaagctgcccgctctgagcgagctggatgaagtgatcctgaatcctgtggtgctgcgggccgtgacacagaccagaaagatcatcaacgccatcatcgataagtacggctccccgatgatcattaacatcgagacagccaaagagctgtccaagagcttcgacgagaggaacaaaatccggaaagagcaagaggaaaacaacagcaagaacgaggaaatcaagaagaacattaagaacgagttcaacatcgacgccaagccgcaggacatcgtgaaagtgaaactgtggcgggaacagcagggcctgtgtgcctactctcagcggagaatcgagttcgataagctgttcgacgacaactacgtgcagatcgaccacgccattccattctccaagtgctttgacgacagctacaacaacaaggtgctggtgctgaccgatgagaaccagaacaagagagagcggaccccttacgagtacttcggcgaggatatcgagcactggcacaagttcgaggaatttgtgaacctgatgtacaagaacaactccaagaagaagcagaagctcctgatcaagaacttcagcgaggacaagagcagagagtggatcagccggaacatcaacgacacccggtatatcgccaagtttatgcagaactacatcagagagaatctgctgttcgccgagagcgagaacaaaaagaaggtgttcaatatcaacggcagcgccaccgccgtgctgcgaagattttggggcctgagcaagaaccgggaagagagcgacaaacatcacgcccaggatgccgtggttatcgcctgtgccacacctggcaatatccagcgggtgtccaactacagcagacgcaagatcctgcacaaggacagcatcatcgacaaagagacaggcgagatcattgacctgaccatcaaagagccctggcctaacttcagaaaagaggtggaagcccggatggaagatgccgacaacaatggcgagctgtacctgctgaagcacgggatcttctacaactacaacgacatcgatatcaataccatcaagcccatcttcatcagcaggatgcccgagcacaaagtgaccggcgctgcccacaaggatagcgtgaagtctctgaagtacaaagagaagaatttcaccaccatcaagaagccgatcatcagcgtcagcagcgccgagatcagaaccatcgtggaagatgagcggtgccgggacctgtacatctccgaccggattatgtacgactacttctaccagcggctggtcatcgagaaacagaaagccagcgtggtgttcaaagaaggctaccggaagaacagcaacaacggcatcggacccatcgtgcggagcatcaaagtgccttctctgggaatcagcggcgtcgagctgaagaacaagggaatcgccgacaacgacaacatggtccgaatcgacatcttcgagaaggacctcaagttctacatggtgcccatctacgtgtccgatttcaccaagcaagagctgcctaacaaggccgtggtggcctataaggacgagtccgagtggaaagagatggacagcacctacagcttcaagttctctctgtaccccaacgacctggtcaagattaagaagaaggggaagaaagaggaatttctgtactacaacagcgccaacagacggatcgccagcatcaccctgatcacccctaatgagggccacaaggtggaaaacatcggcatccagggcctcgagatctttgagaagtacaacgtggacatcctggggaacatcagcaagatcaagaatgagaagcgcgagggcgtgaagaagctgggatcc

SEQ ID NO: 234 - DNA, 3234 bp, synthetic construct
  misc_feature 1..3234: note = Synthetic sequence or unknown origin
  source 1..3234: mol_type = other DNA
ggtaccacgcagaagaaagaagtcaagaagatgagcaagaccgacagcatcagcagctacaccctgggcatcgatctgggcagcaattctatcggctgggccatcgtgaagctggacgagaacgataacccttgcggcatcgagaaagtcggcgtcagagtgtttgaggccggcatgaagggacagtacgaggaaggcaaagaggaaagccggaacaagaagcggagagaagccagactcgtgcggagacagattgagcggagagccagaagataccggaagctggccaatctgctccagcagatcaaactgctgccccagggcgatctgaacgatagcggcgaaagacagagaatcctggacgagctggacaaggtgctgcggaccaagtacatcaacaaccatctgagccccgaggaaaagaaccggctgcaccagatcttcatctactacctgcggagcctgagcgtggaacagaagctggaacctaacgctctgggcagagtgctgtaccacctgggccagagaagaggcttcctgagcaacagaagaggccagaagaaggacaacgaggaacagggcaaagtgaagaagggaatcgccgagatcagagtggaaatgagcagactgggcaccgagacactgggcaagtacttcgctcagatcgacaccatggacatcaaccagaagcggatcagaggcagatgggtcgcccgggatatgtacgagcaagagttctacaccatctgggacttccagagccagttctaccccgagctgctgaccgaagagaagaagaagcaggttttcttcgccatcttcttccagcggcctctgaagtctcagaaggataagatcggcttctgccagttcgagtgtatcgccagaggcaagaagagaaacagacgcagagccccttgggtcatcctgaaggcccaaagattccggctgctgcagaaagtgaacgacctgctgatcgtggccgacaagaacaccaagaatcctctgaccgacgacgagcggaagctcgtgattgagcacctggaaaaaaacggcgacaccaccttcacacagctgagaagcctgctgagactgcccgaggaagtgaagttcaatctggaagtggccggcgaggaaaaaatccccggcaatagaaccgccagcgagatccggaaagtgatcggagagcactgggacggcatgaacagcgaagagaaagacaagctggtcgaggacatctacagcatcgtgtccgacagagccctgaagaaacggctgatgcggcactggaagttcaccgaggaagaagcccagaagctgtctgagatccccatcgaggacggctactgcaatctgagcagacaggccatcgacaagtttctgcctggactgcagcaggggagaagatacggcgagctggtcaaagaaatctacggcatggacgccatccgcgagggcttcaaagttgacctgctgcctcctatcgaggaagcccctatcggagagatcagaaaccccaccgtgcagaaaaccctgagcgagatgagaaagatcgtgaacgagattgtgaagctgtacggcaagccccggtacatcagaatcgagacaggcaaggacctgcggaataccaagaaagaacgcgagcggctgtggaagaacagcagagacatggaaaaagagcggaagaaaatcaaggacaacctgatgaagaacgggatcgctaaccccaccagagatgacatcgagcggtacatgctggccaaagaatgccggtggatctgtccctacaccggccgcagcatcaagttcaagagcctgttcgaagagagccagtacgatatcgagcacatcatccctctgagccggtgcctggacgacagcttcaagaacaagaccctgtgctaccacgaagagaaccggaaccggaagcacaacaagacaccctacgagacatacagccaggacgagacacggtggaacgaaatcctggaacgggtgtccaagttcaacagcgcccacgccaaagagaagctgaagagattcaacctgcacggcaagaccctcgaagagttcatcgataagttcagcagcagccagctgaacgacaccagatacgctgccagggaagccgtgatcttctgtggcctgctgtatggcagcgagtacagaaagcacgtgttcgccgtggccggacctaccacagccgtgattagacggatgtggaagctgaacaagctgctgggcagccccgagaagaatagagaggatcacaggcagcacgccatcgacgccattgtgatcgccattacaagccccgccatgatcaagaacatcagcgagcaggccgagaagattcccaagagcgagcgcaagcacgaccggtggtggcgttttattcagcctccttgggacaccctgtacaacgaggctaaagagaagatcctgagcatcatcgtgtctcacaagcccgagaggaaggtgtccggcagactgcacgaagaaacaaactacagccctcctaagcagggcgacaacaaggacgaaacagtggtgcacgtgcggaaggccattgccagcctgtctaagggcgaagtggaagagatcgtggaccctgtcgtgcgggaaaccgtgaagaagaaactggaagaactgggcaaagagaaccccaagaaggcctttaccgacctgaagaactaccctctgatgcccaaccggaagggcctgcagatccctatcaagagcgtgcggattcggaaaaagctgagcgtgttccctgtgggctccaagcacagagtcagatacgtggccaccgacgagaaccaccacatcgagatcttcgagacaaaggacaagaaaggccggatcatctgggatgccaatgtggtgtccatgttcgaggccatgcagcgcaagagaaggggcgaagagatcatccagagaaagctgatccgcgacggcaaggtggtggaagatgccaagttcctgttctccctgtgcaagggcgacatggtgtacatgaaggactccgagggcgagtaccagtactataagctggtcattgtgtccgagtacgccagcggcgccaaagtgatgtttttcctgcctcaccacgtggcaaagatccccaagtcttgggtcggactgaccaagacaagcagcgccctgcagaagtccgaggccaagaaatgctccatcaacgtgctgggcgagacacacattgcccacgatggatcc

SEQ ID NO: 235 - DNA, 3237 bp, synthetic construct
  misc_feature 1..3237: note = Synthetic sequence or unknown origin
  source 1..3237: mol_type = other DNA
ggtaccaacatgagctacggcatcggcctggatatcggcgtggcatctgttggatgggccgtcgtggaactggatgagaatgccgagcctttcggcctgatcagagccaacgccagaatctttcagggcgccgagcatcccaagaccggcaattctcttgccgctcctagaagagaggcccggtccattagaagagttgtgcggagaagggccctgcggaagcacgatttttacgccctgctggaaaaagaggggatcgccaagaaagaagagatggacaagatgttcagcgccggcaacctggaagatatctacaagctgagagctagagccctggacgagacagtgtctaagaaagagtttgccagaatcctgctgcacctgatgcagcggagaggcttcaagagcaaccggaaggccgacaagaacagcgaggatggaaagctgctgagcgccatcagcgagaacgagaagcggatgaaggaaaacggctaccggacagtgggcgagatgctgttcaaggacgagatcttcggcaagcacaagcggaaccggaccaacgattacgtggccaccgtgtccagagatgagatcaagcacgaggccgaaaccgtgttcgagatgcagagacagtttggccaggactgggccagcaagaccttcgagacaaagtacctggccatcctgctgagacagcggagctatgatcaaggccctggcggcgattctccttacaaaggcggatggaaggatgagatcggcaagtgcgctctgatccctggcgaggacagagccttcaagaacacctacaccttcgagcggagcaccctgctgcagaagatcaaccacctgagagtgtgggagaacggctacaccagaggcctgaccgaccaagagagaaagagcctgatcgacctggcctaccggatcgagactgtgtcctacagccggatcagaaaagaactcggctgggccgacgacatcaagttcagcgacatccagtacgactaccgcgacaaagagaagaacaagaaagaggaagataagcgcaagctgcccgtgatgagaggctaccactctctgcggaaggtgctgaatatcagcaacaccgacgccaacttcgacaagcacctcctggatgacatcgtgacagtgctggccctgcacaaggataccgaggccagaaagaaagagctggaaaagctgcccctgaccaaagagcagatcgacaagctgctcgagctggacttcagcaagacaggcaacctgagcatcaaggcctgcgagagaatcgagccctatctgctggaaggcctgacatacgacaaggcctgtgaaaaggccggcttcgattttcacggacacacagccggcggaaagggaagcacacttcctgccaatgccgaggaactgaagaacatcaacaaccccgtcgtgcggagatccatcagccagaccatcaaggtggtcaacgccatcatcagagacatgggctgtagccccatgtggattcacatcgaggtggccagagagctgaagcacagcttcgacgagagaaaaaaggccaccgccgccatgcaagaaaatcaaaaagaaaatgagaaactcatgaaggaaatcaaagagacattcgggattctgaaccccaaaggcctggacctggtcaagtaccggctgtggaaagaacagcaagagcggtgcatgtacagcggcaagcccatcgagagaagcagactgtttgagcctggctacgccgaggtggaccacatcgtgcctttcagcatctccttcgacgacagccggaacaacaaggtgctggtgctgacctccgagaaccagaacaagggcaacagactgcccctcgagtacatgaccggcgagcagagaaaggccttcatcgtcagagtgaaggcccaagtgaagaacggcaagaagaagcagaacctgctgagggaaaaagtgaccgactacgagcgggacaacttcagagagcggaacctgaaggacacccagtatatcgccaagttcctgttcaactttatccaggaccacctgatcttcgcccagctgcctaagggcaagaaacagcatgtggtggccgtggctggcggaatcacagccacacttagatctagatggggcctcgtgaaactgcgcgagaatggggatgtgcatcacgccgtggatgccattgtgatcgcctgcaccacacagaagatgattaaggacatcagcgactactacgcccggaaagaggcctgtcataacgcccctctgagattccccgagccttggcctaacttcagaaaggacatcgaccagcggctgacccagagcagcttcagcaaagaggacctgatgaagtgcaaccccgtgttctacagccaagtggacatctccagaatccagcctgtgttcgtgtcccggatgcctcagcacaaagtgacaggcgccgctcacaaagaaaccatcaagagccccaaggctctggaagatggcctgctggttaccaagcagcctctgacagccctgaagctggacaagaaaaccggcgagatcgagctgtactaccagcctagcagcgataagctgctgtacgaggctctgagagccagactgcaggcttttgacggcgacggaaagaaagcctttgccggacctgagcctttccacaagcctaaggcagatggcacccctggacctatcgtgcgcaaagtgaagctgtatgagaaggccagcctgagcgtgccaattcatggtggaagaggcgctgccaacaacgacagcatggtccgaaccgacgtgttctttgtgcccggcgagggctattacctggtgccagtgtacgtgtccgacacgatcaagaagaaactgcccgatagagccgtggtggcccacaagagctacagcgagtggaaagttatgaaggaagaggacttcctgttctccctgtacgccaacgacctgattgaggtggaacacaagaaagccatcgtgttcaccgtgtctcacaagggctctacactggcccctaagtgggagacaaagcggaccctgtgttactacgagggcatgaatatctccaccggcgccatcaccatcagcacccctgataatgcctacacactgcccggcctgggcgtgaaaacactggccacactgaagaaattcgaagtggacgtgctgggcaacgtgcgcgaggtgtccaaagagactcggcagcagttcagaggatcc

SEQ ID NO: 236 - DNA, 3243 bp, synthetic construct
  misc_feature 1..3243: note = Synthetic sequence or unknown origin
  source 1..3243: mol_type = other DNA
ggtacccagtggccttatggcgttggcctggatatcggagtggcctctattggatgggccaccgtggctctggatgagaaagctcagccttgcggcctgatcagactgggcagcagagtgtttaagagagccgagcagcctaagaccggcgaatctctggctgcccctagaagagaagccagaggcatgcggagaaggctgagaagaagggccctgcggaagcaggatttctaccagctgctggaaaagaaccatctgcctgacaaagaggaactgagcagactgtttgccgctggcggcctggaagatatctacgccctgagaactagagccctggacgaggctgtgacccctcaagagtttgccagaatcctgctgcacctgatgcagcggagaggcttcaagtctaacagactggccggcaagagcaagaaagacggcgttctgctgcaggccgtgacacagaaccagctgagaatgcaagagaacggctaccggacagtgggcgagatgctgtacaaagatcctctgttcgccgcctgcaagcggaacaagggcgagaattacctgagcaccgtgtccagagaggaaatcgccaacgaggctcagctgctgtttgaggcccagagagagaagggcagagattgggccacacctgagctggaagccgagtacctgtctatcctgctgagacagcggagcttcgatcaaggccctggcggcaattctccttacaaaggcggatgggccgagagagtgggaccttgtacactgctgcctgaggaaaagcgggccttcaagaacacctacagcttcgagagattcaccctgctgcagaagatcaacaacatccggatcgtggaaagcggccagacacaggccctgagcgacgaagaaagacagaaagtgatggacctggcctacagagtggaaaccgtgccttacacactgatccggaaagaactgcagtggccccagaccatcagatttgccgacgtccgctacgatgtggatgccgctcctgaagccgccgagaagaagtgcaaactgcctcctatgaagggctaccacgctctgagaaaagccctgggaacaagacaggccgagctgcctctgtgggacgatgtgattacaatcctggccagccacagagatgaaggcgtgcggaagaaactgctggaagaaaagggcctgaccgccgaacaggtggaagctgtgctgggactcgaattttctggcgtgggccacatcagcctgaaggcctgtcaaatgctggaaccatggctgctccagggcctgaagtacgatcaggcctgttctaaggccggactggacttcagaggccacagcaacatcaagaaaacccctaagctgcccgccagcgctcccgagctgaaggatattacatctcctgtcgtgcggagagccgtgtctcagacaatcaagctggtcaacgccatcatcagagagatggaacagcctcctgtgtggattcacatcgagctggccagagagctgagccggaccttcgaagaacggcggagagatcagaaatccatggaagataacgcccggcagaacgagtgcctgatgcaagaaatccgggacaccttccacaagctgaaccctaccggccaggacctgatcaagtaccggctgtggaaagagcaggacggcatctgcgcctactctcagcagtctatcgccgtggaaagactgttcgagacaggctatgccgaggtggaccacatcgtgccctacagcatcagcttcgacgacagcagatccaacaaggtgctggtcatggccgccgaaaaccaccagaagggcaatagactgcccctgcagtacctccagggcgagagaagagaaaagttcatcgtgtggaccaagagccaagtgcggaactaccggaagcagaagaacctgctgcgcgagacagtgtccgaggaagaacagaacggcttcaagcagcggaacctgcaggacacccagtacatggcccggtttctgctgaactacatcagggatcacctggccttcgccgatcatcctgccgctggaaaacagcgagttatggctctggctggcgccgtgacaagccacctgagaaaaagatggggactgaccaaagtccgcgccgacggcgatctgcatcatgcactggatgctgccgtgatcgcctgtgccacaaaaggcatggtgcagcaaatcagcggctactaccaccggatcgagggcgaataccagcagtcctctgatggcacatacagcgtgcacaccagaaccggcgaagtgtttcctgctccttggcctcacttccgggacgagctgattcagagactgtcccagaagcctcaagagaacctcatgcagtggaaccccgtgttctacagcaacttcgacgtggaatccatcagacccgtgttcgtgtccaggatgccccagcacaaagtgacaggcgccgctcacaaagaaaccatcaagagccccaaggctctgcaggatggcctgctgattgtgaagcaccctctgaccgacctgaagctgaacaagaaaacaggcgagatcgaggggtactaccagcctagcagcgacaagctgctgtacgaagctctgagagcccgcctgctggaatttggcggagatggcaagaaggcctttaccgagcctttctacaagcccaagtccgacggaacacctggacctctcgtgcggaaagtgaaactgtgcgagaaggccagcctgtgtgtgcctgttcatggtggaaacggcgctgccgacaacgattctatggtccgagtggacgtgttcttcgtgcccggcgacggctactatatggtgcccatctacgtgtccgacaccaagaagaaagagctgcccaatagagccgtggtggcccacaaagagttcagcgcctggaaagttatggaagagaagaatttcctgttcagcctgtacgccgacgacctgattgaggtggcccggaaaaaagtgatgcccttcaccatcgtgaacagcggcagcacactgcctccaagctacgagacaacccacgagatggtgtactacggcggactggatatcagcagcggcaatatcaaagtgaccatccacgacaacagctactccctgagaggcctgggcatcaagaccctgaacaccctgcagaaatatgaggtggacatcctgggcaacgtgcgggaagtcaagaaagagaagcggcagtccttccggggatcc

SEQ ID NO: 237 - DNA, 3249 bp, synthetic construct
  misc_feature 1..3249: note = Synthetic sequence or unknown origin
  source 1..3249: mol_type = other DNA
ggtaccaaatacggcgtcggcctggattgtggaatcgcctctgtgggctactgcgtgaccgagctggacttcaacgacgagcccagaagaatcatccggctgggcagcagaatcttcgacaaggccgagaatcccaaggacggcagttctctggcccagcctagaagagagaagcggggcctgagaagaaggatcagaaggcaccagcaccggctggaaagaatccggtacatgctggtgcaagagaacatcgtgtcccaggccgaactggacaccatgttcaagggcaagctgagcaacatctacgagatccggacaagagccctggacgagcccgtgtccaatatcgagtttgcccgggtgctgatcaacctggctcagagaagaggcttcaagagcaaccggaaggtggacgaggaaaccagcgacaaagagacaggcaagctgctgggcgccatcgagaacaacaaagagaatatcatccagaacggctaccggaccgtgggcgagatgctgttcaaggacgagcggtacagcaagtacaagcggaacaaaggcgaggactacctgaacaccgtgtccagagacatgatcgccgacgagatcaaggccatcttcgccagccagagaagcttcggcatgcccttcgccaacgagaataccgagcacgagtacaccgacatcgtgatgagccagcggccttttgatcttggccctggcgagggcaatgagaagtctccttctccttacgccggcaaccagatcgagaagatggtcggacggtgcacattcttcccaaaagagaagagagccgccaaggccacctacagcttccagctgtttagcctgctgcagggcatcaacaacatcaccctggtggacggcaacagcaacaagtaccctctgtctgcccaagagcggagaatcctgaaagagtactgcttcaacaccgccaacgtgacctacgccagcatcagaaagaagctgggcatcagcaccgactaccggttcaacaatatcagctacggcgagaacggcatcgaggaaagcgagaaaaagaccaagttccagcacctgaagaactaccaccagatgaagaagatcctgggcgacagcatcaacgccttcagccacgatgagctggacgagatcggccggatcttcacctactacaagaacgacagcaagatcatcgagaatctcaaagaggccggcatcgacgagagcatgtatcccagtctgctgaagctgcctagcttctccaagatgggccacatcagcgtgaaggcctgcaagatgctgatcccattcctggatgagggcaagacctacaacgaggcctgtgaaagcgccggaatcgacttcaaagcccacagcatggccaccaagcagatgtacctgcctcctaagagcgacgagctggaagatatcgtgaaccccgtggtcaagagggccgtgtctcagaccatcaaagtgatcaacagcatcatccgcgagatgggcaacagccccacctacatcaatatcgaactggcccgggacctgagcaagagcaagaaagagcgggatctgatcgacaagaagtaccagaccaacagggccgccaatgagcagattaagaaagagatcgccgataacttcggcttcgaggccaaaggccaggacatcatcaagctgaaactgtggcacgagcaggacggcatctgcccctatacactgaagcccatcgagtacggcaagctgttcaacgacaagggctacgtggacatcgaccacatcgtgccttacagcgcctgcttcgacgacagctacaacaacaagatcctgaccttctccagagagaaccggcagaagtccaacagactgcccctggaatacctggacgaaagccagaaatccaagtaccgcgtgtgggtcaacaacaacattaagaattaccggaagaagcagaacctgctcaaagagtgcctgaccgagaacgacaaaaaagagttcaagagccggaacctgaacgacaccagatacctgtccaaggtgctgtacaactacatcaacgataacctgctgttcgacgagttctacgacgaccggaagagacacgtggtgtctgtgaatggcgccgtgaccgcctacatgaggaagagatggggcatcgacaaagtccgcgagaatggcgatctgcaccatgccgtggatgccgccgtgatctcttgtgtgacccagggcatgatcaatcagatctccaagtacagcttcgacaaagaaaccgagttcgacgtggacaccagaaccggcgaggtcctggaacagttcccatttccatacagagagttccggaaagaactggaagccagaagcgagatcgaggacgagaagcggctgaagaacgtgctgctgagcctgcctaactacagctacgacgatgtggaagtggccaagcctgccttcgtgtccaggatgcctagacacaaagtgaccggcgaagcccacgaggccacaatcagaagcggcaaggtcgagggctataccatctctaagatccctctgaccaagctgaagctcaagaacggcggaatcgataagtactacaagcccgagagcgacaccctgctgtataacgctctgctgcagcggctggaagagtttaacggaaacgccgagaaggcctttgccgaagagttccacaagcctaagtccgacggcacacctggacctgtcgtgaagaaagtgaagatcattgaaaagtccagcagcaacgtgaaggctcggaacgagaacaagctgggcgttgccgataatggcagcatggtccgaatcgacgtgttctatgtggacggcgagggctactacttcgtgcccatctacgtgtccgacaccgtgaagcccacactgcctaacagagcctgtagcagaggcaagtccggatggaaagagatggacgacaaggacttcgtgttcagcctgtacagcaacgacctgatcagaatcaccgccaagaaagacatgaagttcagcctcgtgaacaaggacagcaccctgccttccaacaagttctccaacggcgagctggtgtactacatcaccgccgatatctccaccgcctccatcaccgtggaaacccatgatggcgcctacgccttcaaaggctgtggcatcaagaccctgaccaacatcgagaagtacacagtggaccctctgggcaacgcctccaaagtgaaaaaagaaaagcggatgtacttcaagggatcc

SEQ ID NO: 238 - DNA, 3252 bp, synthetic construct
  misc_feature 1..3252: note = Synthetic sequence or unknown origin
  source 1..3252: mol_type = other DNA
ggtaccaagtggccttatggcatcggcctggatatcggcgtggcatctgttggatgggccgtcgtggctctgaatgatgctgctcagccttgcggcttcatccggctgggcagcagaatctttaagagagccgagcagcctgacaccggcgaatctcttgctgcccctagaagaatggcccggtccatgagaagaagaatccggcggaaggccctgcggaagcaggacctgtatagactgatggaacagtgcgacctggccacacaagaggaactgtctgccctgtttgccgccggacacctggaagatatctacgccctgagaacaagagccctggacgagagcgtgaccagccaagagtttgccagaatcctgctgcacctgatgcagcggagaggcttcaagagcaacagaagaaccgccaacagcagcaaggacgatggactgctgctgcaggccgtgacacagaatcagcagagaatggccgagaacggctacagaacagtgggcgagatgctgtacaaggacagcctgttctgcagccacaagcggaacaagggcgaagcctacctgagcaccgtgtccagagatgagattgccagagaggcccagacactgttcgccgtgcagagaggatttggccagccttgggctacacctgagctggaagccgagtacctgtccatcctgctgagacagagaagcttcgatgaaggcccaggcggcaatagcccttatagaggcggatgggctgacaagatcggcagctgtacactgctgcccgacaagcacagagccttcaagaacacccctaccttcgagcggttcaacctgctgcagaagatcaaccacatcagagtggtggaaagcggcctgaccagacctctgtctgaggaagaaagagcccagctgctggccctggcctacagaatcgagacagtgccctacaaccggatcagaaaagagctgcactgggacgagggcgtcagatttgccgacgtccgatatgagacaggcgccaagcctgagacatacgagaagaagtacaagctgcccatcctgaagggcacccacgctctgagaaaggccctgaaggccgacacacctgacttccctctgtgggacgaactggtcacatttctggccctgcatagagatgaggacgccagacggacaatgctggccgaaaaaggactgacccctgctcagactgaagccctgctggatctggattttgccggcaccggccacattagcctggaagcctgtagaatgctggaaccatggctgctccagggcctgacctatgatcaggcttgtacacaggccggactggacttcagagcccacaacaacaccgagaaggacgtgaagctgcctgccagcgctcaagaactcgaggacatcacaagccctgtcgtgcggagagccgtgtctcagaccatcaaggtggtcaacgccatcatcagagagatgggccagcctcctgtctggctgcatctggaactggccagagagctgtccagaacactggacgagcgcagaaaggccgaaaagagcatggaacagaacgccttcgagaacgagcatctgatgcaagagatccgggaaaccttccacatgctcgagcctacaggccaggacctggtcaagtaccggctgtggaaagaacaggaccacagatgcgcctacagcctgcagtatatcgccccagagcacctgtttgagagcggctatgccgaggtggaccacatcgtgccttacagcatcagcttcgacgacagccggtccaacaaggtgctggtgctgtctgccgagaaccggcagaagggaaatagactgcccctgcagtacctccagggcgagagaagagaaaagttcatcgtgtggaccaagacgcaagtgcggaactaccggaagcagaagaatctgctgcgcgagagcctgagcgaagaggaacagaatggcttcaagcagcggaacctgcaggacacccagtacatggccagatttctgctgaactacatccgggaccacctggcctttgctgatcatcctgccgctggcaaacagagagtgatggctctgtctggcggcgtgacaagccacctgagaaagagatggggcctgacaaaagtgcggaccgacggcgatctgcatcatgctctggatgccgctgtgatcgcctgtgctacacaaggcatggttcgacaggtttccggctactaccaccggatggaaggcgcctatctgcagcaagccgatggcaatggcagcacacactctagaaccggcgagagatttcccgctccttggcctcactttagggacgagctggtgcagagactgagccccaatcctcaggacaacctcatgcagtgcaaccccatgttctacagccagttcgacgtggacagcatccagcctgtgtttgtgtccagaatgccccagcacaaagtgaccggcgctgcccacaaagagacaatcaagagccccaaggctctgaacgacggcctgctggttgtgaaacagcctctgacagccctgaagctggacaagaaaacaggcgagatcgccggctattaccagcctagcagcgacagactgctgtacgaagccctgagagccagactgcaggcatatggcggagatggcaagaaggcctttagcggccctgagcctttcagaaagcctaaggccgatggaacccctggacctatcgtgcggaaagtgaagctgtgcgagaaaaccagcctgtccgtgctggttcatggtggacagggcgtcgccgacaacgattctatggttcgagtggacgtgttcttcgtgcccggcgacggatattacctggtgcctatctacatcagcgacaccagaaagaaagaactgcccaacagagccgtggtggcccacaagaactacagcaactggaaagtgatggacgaccgggacttcctgttcagcctgtacgccgacgacctgatcgagatcgagcacaagaagggactgaccttcaccgtggccaacaaggatagcacactgcccgctcagtgggagacaaagcggaccctgtgttactacaccggcatgaacatcagcagcggctccgtgaccatcgtgtctcccgatggcgcctatatcctgcctagcctgggcgtgaaaaccctggtgtccctgaagaaatatgaggtggacgccctgggcaatgtgcgggaagttcggaaagagagcagacagcggttccggggatcc

SEQ ID NO: 239 - DNA, 3252 bp, synthetic construct
  misc_feature 1..3252: note = Synthetic sequence or unknown origin
  source 1..3252: mol_type = other DNA
ggtaccaagatcatcggcctggacatcggcatcagatctatcggatgggccctgcaagaggacggcgagatcattgccaagggcatcagaatccccagatccgtggaagatgcccagaccaaagaaagcctggccgctcatagaggcgccgctagaagaatcagacggaccctgtacagacggaaggccagactgtctctgctgaagcggctgatctgcaacgagttcggcctgaacctggccgactatcacgccaaagatggcgacctgcctaaggccttcgtggccgatgagaacacaaagagcccctacgagctgagagtgaaggccctggaacacaagctgaacgccgatgagttcgccagagtgatcctgcatatcgccaagcacagaggctacggcaacaagcacgcccggaaagagagcgataaggataagggcgctgtgctgagcgccctgaagaacaatgagaaagccctgaccgcctacaagagcgtgggcgagtacctgtacaaagagttctaccagaagggccgcttcatcaccaccaaggacgagaacggcaaagaggtgctggaacgcgacgaggcccatttcggaaaagtgcggaacaccaccgacgtgtacgagcagtgcatgagacaagagtggctgcaggccgagctggaactgatcttcgagaagcagagagagctgggcttcaagttcagcgacgagttcaagaacaaagtgctcgagatcgccttcttccagcggcctctgaaggacaccgatgacaaagtgggcttctgcacattcttcccagacgagaagagggcccctaaggatagcctgagcgccattgaatatgtggccctgggaaagatcatcaacgagctgaagtacatcgagaagaagtggaagaaagaaaccggcgaggaactgaagggcaagatctgcgcccctcagaacatcaacgacatcctgaagatcgtgatcgagaagggcgagattagctacaaagaatttcggagcatcctcaagctggacgagcgcgtgaagatctttagcaagaacgtgaagctggactacacccagaaaaccatcgatgaggccgagaaggccaagttcctggaactcaaggccacaaaggacaacctgaacatccccaacctgaagggcttccagaacgccctgaaaggcagctttgagaagttcgacagaaagaccctggacgatatcgccttcgacctggccaccatcaatgacaaagagaagctgttcaaagagctggataagtacgacctgtccgccgagcagaaagaggccctgagcaatctgagcttcagcaagtttctgaacctgagctacaaggccctgaacgagatcatccctctgatgaaggacggcctgagatatgacgaggccgtggaaaagctggggtttaagccctccgacgagtacgactacgacaaggtgcagaaagaactgcacaaccccgtggtgtctcacatcctggccgaggttgtgaaggtgctgaaggccatcctgaaaaagcacggccaggtgcacaagatcaacatcgagtttaccagagaggccggcatcagcaaagagaaacggaacaagctcgagaacaagcagaagtccaatttccaggccaacgagaaagccaaagagatgtgcaacaccctgggcatcgtggccagccacaagaacattctgaagattaagctgtggaaagagcaaggcggagcctgcgtgtacagctgcaacaatggcaagggcaaaaccatcaccgagaaggacctgcaggacgagacaaccctgcagatcgaccacatctacccctacagcagaagcttcgacgacagctactccaacaaggtgctggtgttcacagagcagaaccagatcaagagagagcggacccctttcgaggccttcggcagcaataccaacaagtggaacaatatcgtgtccttcgtgaacggctgcaagaccatgagcgagtccaagaagaagagaatcctgaacaccgagtttaaagagcgcgagcagggcttcatccagcggaatctggtggacaccagctacattgccaacgtcgtgcgggactacatcgacaaaaacgtgaagttcctgcctctggacgaaaaagaactggcccagagcaccatgttcttcgagctggacagctacaacgagaaggatgacagcaagaaggcctacaagcgcaagcacatcgagattatcagcggcaacctgaccagcatgatgaagcactactggggcctgcacttcctggacaagaagaatgagttcggcgagtacgagaaagaccggaaccaccatctgcatcacgccctggatgccatcatcatcagctacatgaacgccagccgcgtgaaggcctttgccgacttcaagaaaaacctggaaaccatgaaggccagcgagtacgccgagaagctgagcgagattgagaaagagcagaagcggaccaagcggaagaaaagcaccttcgaggtgcccagcaactacgccaatcgggacgagttcgagcggaagatcaaagaacagatcttcggcatcttcgtgtcccagcctccaaacaagaaagccagaggcgccctgcacctggatagcttctacagccagagcgacaccagcgtgatcagcagcaaggacaccatggaaaacgccctcgaactgggcaaagtccggaagatcggcaccaagatcgtgtccaatgccagcatggtccgactggacatcttcaagagaaagaaggacgacaagttcttcggcgtgcccatctacacaatggacttcgccaaaggcgtgctgcctaacaaggccgtgggcagcaaagaatggatcgagatggactccaactacgagttcctgttcagcatcttctccaacgacctgctgtacgtgaagaaaaaaggcatggaaaaagccgagctgtgctactacgtgaaattcgacatcggcggaggccagatcagcttcaagagccacgacaacagactgaagtccctgaccgagaatcagatcaaactgtacggcactaaggaccccaccgaggaaagagtgcggggcagagttggaatccagaatctggaaattttcgagaagtggcaggtttccccactgggcgaagtgaaaaaggccgagttcaaagaaagggaaccgatcgctctgaagtccacacctaagaactctaagctggacaaactgaactccaagaccgagaggaagggatcc

SEQ ID NO: 240 - DNA, 3258 bp, synthetic construct
  misc_feature 1..3258: note = Synthetic sequence or unknown origin
  source 1..3258: mol_type = other DNA
ggtaccaaatacgtgatgggcctcgacctgggcatcacatctgttggctgggccgtgatcaacctggacaagaagagaatcgaggacctcggcgtgcggatctttcctggcggagaaagacctaaggacggcggcagcctgaacgagaacagaaggctgtttcggggccagagaagaaggctgagcaggcgaagagtgcggatgcggaagatcaaagaactgctggtggaacagggcctgatcgtgaaagaggaactggaaaacttctaccagctgaagaaagaggaccgggacgtctggctgctgagagtggaaagcctggaacggaagctcgaggacaaagaatgggccagagtgctgaccacactggccaagagaaggggctacaagagcaaccggaaggacagcaagagcgagaaagaagagtccggcagagtcctgaaggccatccagctgaaccagaccatcatggaaaacaagaactaccggaccgtgggcgagatgctggtcaaagagacaaacatcaccaccgagactctggccaagcaggccctgagaaacaaggccgatcagtacgatcactgcgtgctgcgggaaatgctggtcgaggaactcaagaccctgttcgagatccagcggaacctgggcaatctgaaggcctccgagagctttgagaaagaatacctggaagtgttcgagtaccagaaacctttcatgacccgcgagctgatggaaaagatgatcggcaagtgcaccttcgaaaaagaagaacccagagccagcaagaacagctggaccttcgagcggttcatgctgctgcagaagatcaacaacctgacctacagcaccggcagcgagaagcacaacctgagccaagaggaacgcgagaagatcattaccctggcctacgagcagcgcgagatcaagtacaccacactgagaaagacactgaagctgcccgacgacgccagattcaccggcctgaactacttcatccggaagaagaagcaagaagaactgaccgaggaaaagtaccggcaagaggtggaaaagaccaccttcgtgaagctgaacggctaccacacactgaaagaggcctttaagaagaacgagaagattggcctgtggaaagagtttgaaaaagacaaagagaagctggacgacgtcgccgagacactgagcaagagcaagaccgagcaagagatccagaaagagctggaacagatcggcctgaccaaagaggaaatcgccatcgtcaaggacgtgaacttcgataagtacggccacctgagctacaaggccatgaagaagatcctgccttatctggaagagggcaagacctacgacaaggcctgtgaactggccggctacaacttcaagaacgaaaccgagaatccccagaagaagctgcctcctatcctgcaagagcggggcatcaaccccgtgatgtacagaaccgtgacacagaccagaaagatcatcaacgccatcatcgagaagtatggcagcccctacgagatccacatcgaggtggccagggacctgaccaagaacagggacgagcggaacaagatccaaaagaaacaagaggaaaaccgggccgagaacgaaaaaacgaaagagtacatccgggaaaccttcaagatcgagaaccccaagcctgtggacatcctgaaagtgaagctttggagagagcaaggcggcaagagcgcctacagcctgaaagccatttctcccgagcagctgttcgaggataactacgtgcagatcgatcacgccctgcctttcagcagaagcttcgacgacagctacaacaacaaggtgctggtgctgacaaaagagaaccaggacaagcggaatctgacgcccagagagtacattaagaacgaagaggaatgggagcagtacgaggcctggatcaagaccacatacaagtacaaccccagaaagcgcgagaacctgctgatgaagaatttcgacgaggaaagagccggcgactggcgggctagaaatctggtggataccaagtatatcgcccggttcctggccaactacatcaagtccaacctgctgtttgaggactacggcgagaagtccaacaggatcaaagtgaagatgatccctggcggcgtgaccaccgctctgagacattattggggaatcgccaagaaggacagagagacagatacccaccacgctgaggatgccgtgattctggcctgcgccaccaacgagttcatcaacaaagtgatggacttcagcaagtacaaagagctgtaccacgagtacaaggacggcaattacatcgacaaagaaaccggcgagatcgtcgagaacaagtataagacccacgagatgaagcggccctggcctgagttcaaagaagaattggaggcccggaccagccagaatcctagacacgatctggaaagcggccagtttaagaactacaacgacttcaacttcgagaatctgaagcccctgttcgtgtccagaatgcccaataggaagatcaccggacaggcccacaaagagactatctacagcgaccggaagaacggcgtggtggtcatcaagacacggctgcaagaactgagcggcgaggacatcaagaacatctgcaccaaagaagagtacaaagaactctacatgagcgacaagaacacctacgacgccatctacagacggatggccgagtacaatttcaaggccgacaaggctttcgcccctggctacaccatcagaaagaaggccaaaaacggcgagggcaccatcgtgaagtctatcaaggtgcccagcaagatgaacagcggcgtgaaggtgcaaggcggaattgccgctaatggcggcatggttcgagtggacgtgttcgaaaaggatggcaagtactacctggtgcctgtgtacgtggccgatctcgtgaagggcgagatccccaatctggccatcatggctaacaagcccaagtccgagtggaccttcatggacgagtcctacaactttaagttcagcctgttcctgaacgacctggtgtacgtgaagaagggcgaaaaagagatcctgggctactacgtgtccacacactctggcacaggcgccatcaacctgaagtctccaaatggccagagcgagtacgaaggcatcggcgtgaaaaccctggataagtttgagaagtacgaggtggacctgctgggcaactactacaaagtgaaaaaagagacacggaaaggcgggaagtcccggctgaaaaagggatcc

SEQ ID NO: 241 - DNA, 3270 bp, synthetic construct
  misc_feature 1..3270: note = Synthetic sequence or unknown origin
  source 1..3270: mol_type = other DNA
ggtacccacagatacgccatcggcctggatatcggcatcacatctgttggatgggccgctctggccctggatgccgaagaaaatccttgcggcatgctggacttcggcagcagaatctttacaggcgccgagcatcctaagacaggcgcttctcttgccgctcctagaagagaagctagaggcgccagaagaaggctgcggagacacagacaccggaacgagagaatcagacggctgatggtgtctggcggcctgatctctcaagagcagctggaatctctgttcgccggccagctggaagatatctacgccctgagaacaagagccctggacgagcctgtgacaagagaggaactggccagaatcatgctgcacctgagccagagaagaggcttcagaagcaacagaaaaggcggagccgatgccgaggatggaaaactgctggaagccgtgggcgacaacaagcggagaatggacgagaagggctacagaacagccggcgagatgttcttcaaggacgaggcctttgccgctcacaagcggaacaaaggcggcaactatatcgccaccgtgaccagagccatgaccgaggacgaggtgcacagaatcttcgccgctcagagaggctttggcgccgagtatgccaacgagaagctggaagctgcctacctggacatcctgctgtcccagagaagcttcgatgaaggccctggcggcgattctccttatggcggatctcagatcgagcggatgatcggcacctgtgcctttgagcctgatcagcctagagccgccaaggccgcctacagctttgagtacttcagcctgctggaaaagctgaaccacatcagactggtgtccggcggaaagagcgaacctctgacagacgcccagcggaagaagctgattgagctggcccacaagcaggacaccctgagctacgccaagatcagaaaagagctggaactgaacgaggccgtgcggttcaatagcgtgcggtacaccgatgacgccaccttcgaggaacaagagaagaaagaaaagatcgtgtgcatgaaggcctaccacgccatgagaaaggccgtggacaagaacgccaagggcagattcgcctacctgacaatccctcagagaaacgagatcggccgggtgctgagcacatacaagacctctgccaagatcgagcctgctctggccgctgccggaatcgagccttgtgatattgctgccctggaaggcctgagcttcaccaagtttggccacctgagcatcaaggcctgcgacaagctgatcccattcctggaaaagggcatgaactacaacgatgcctgtgccgccgctggctacgatttcagaggacactctaaggacggccggcagatgtatctgcctcctctgggagatgactgcaccgagatcacaagccctgttgtgcggagagccgtgtctcagaccatcaaagtgatcaacgccatcattcggagatacggcacaagccccgtgtacgtgaacatcgagctggccagagagatgagcaaggacttcgccgaacggaacaagatcaagaagcagaacgacgacaaccggtccaagaacgagaagatcaaagaacaggtggccgagtacaagcacggcacagccacaggactggacatcgtgaagatgaagctgttcaacgagcaaggcggcatctgcgcctactctcagagacagatgagcatcgagcggctgttcgaccccaactacgccgaagtggatcacatcgtgccctacagcatcagcttcgacgacagatacaagaacaaggtgctggtgctgaccgaagagaaccggaacaagggcaacagactgcccctgcagtacctgaccggcgagagaagagatcggttcatcgtgtgggtcaacaacagcgtgcgggacttccagaagagaaagctgctgctgaaagaggaactcacccctgaggaagagaacgactggaaagagagaaacctccaggacaccaagttcgtgtccagcttcctgctgaattacatcaacgacaacctgctgttcgccccttccgtgcggagaaaaaagcgcgtgacagctgtgaatggcgccgtgaccgattacatgcggaagagatggggcatcagcaaagtccgcgaggacggcgatagacaccatgccgtggatgccgttgtgatcgcctgtaccacagatgccctgatccagaaggtgtccagatacgagagctggcacgagagacactacatgcccaccgagaatggcagcattctggtggaccctgccacaggcgagatcaagcagacattcccctatccttgggccatgttccggaaagaactggaagccagactgagcaacgacccttctagagccgtggccgatctgaagctgcccttctatatggacgccgacgctcctcctgtgaagcccctgtttgtgtcccggatgcctaccagaaaagtgaccggcgctgcccacaaggataccgtgaaatctgccagagcactggccgacggcgtggcaatagttagaaggccactgacagccctgaagctggataaggatggcgagatcgccggctactacaacaaggacagcgacagactgctgtacgacgccctgaaggctagactgacagagtatggcggaaacgccgctaaagccttcgccgagcctttctacaagcccaagtctgatggcacccctggacctgtggtcaacaaagtgaagctgaccgagcctaccacactgagcgtgccagttcaggatggaaccggaatcgccgacaacgacagcatggtccgaatcgacgtgttcagagtcgtcggcgacggctactatttcgtgcccgtgtatgtggccgacacactgaagcaagagctgcccgatagagctgtggtggccaacagacagtacaacgagtggaagcagatgtccgacgacgacttcgtgttctctctgtaccccaacgacctggtcaaagtgcggcacaagaggggcatgaagctcaccaagtgcttcgaagagagcaccctgcctgccaccatggactgcaaagaatccatgttctactacatcagcagctgcatcagcaccggcgccatctgctgcatcaccaacgacaatacctacgccatcaagagcctgggcatcaagaccctcgagtccatcgagaagtacaccgtggatatcctgggcgagtatcaccccgtgaaaaaagaggaaagacagcggttcaacaccaagagaggcggatcc

SEQ ID NO: 242 - DNA, 3270 bp, synthetic construct
  misc_feature 1..3270: note = Synthetic sequence or unknown origin
  source 1..3270: mol_type = other DNA
ggtaccaattacgtcgtcggcctggacatcggcatcacatcttgtggatgggccgctctggaactgaacgagaaggacgagcccatccggatcgtggacctgaacagcagaatcttcgacaaggccgagacacctaagacaggcgcttctctggccgctcctagaagaatggccagaggcatcagacggctgacccggcggagaaagtttagactgcacagagtgcggggctttctggtgcagaaccacatcctgaccaaagaggaaatcgacaacctgtaccaagaggcccacaagaccagcatctacgagctgagatacaaggccctgagcgagaaggtgtcccctagcgattgggccagactgctgatcttcttcgccaagcacagaggctttctgagcaaccggaagaacagcaagagcggcgaagatggcgtgatgctgaccgccatcagagagaacgagggcatcctgaagaaatactgcaccgtgggcgacatgatctaccgggacgagaagttcaaagagcacaagcggaacaaaggcggcacctaccagtttaccgtgtccagagccatgctgacagaagagatcaagaccctgttccagaagcagagagagctgggccagccttttgccggaaaagaggccgaggacaagtacctgcagatcttcagcgcccagaggaacttcgatgaaggccctggcggcaatagcccttatgccggcgatcagatcgagaagatgatcggcgactgcaccttcgaggacggcacaaatggcagacccctgaagaagagagcccctaaggccagctacgccttcatggccttcaacctgtggcagaagatcaaccacatcagagtggactacaagggcgaccagcggagcctgacactggaagagaagaacaaggtggccgacctggcctggtccaaagagaacatcacctactacgacctgcggaacaccctgcacatcgaggaagaggccagattcaaggacgtgtcctacagctacaacagcaccagcgaggacagcgagaagaaagtgaagttcagctgggtcaagccctaccacgccatgcggagagccctggaaaaggtggaaaagaactacatcaagaaagtgtcccacgaagagatcgacatcattgcctatgccttcaccgtgtacaagaacgacgagaagatccggtccagcctgaaagagaaaggcatcggcgacaacgtggccgatacactgctggcccacctggatggctttagcaagtttggccacctgtccgagtacgcctgctacaagctgctgcctttcctggaagagggcaacgagtactacaaggcctgcgagatggccggctacgacttccagaagtccagcatcaagaagatgaaggacatccccaatcctgtggtcaagcgggccatcacacagaccctgaaagtgatcaaggccatccagcggaagtacggcgatcccgtggaagtgcacattgaactggcaagagaactggccagaagcttcaaggaccggaaagtgatggacgaccagatgaagggcaacaacgcccggaacgagaaaatcaagaaaaccctgtccgaagagttcggcgtgctgagccctacaggccaggatatcgtgaagtggaagctgtgcgaggaacagaacaacgtgtgcgcctacagccagaaaagcttcgacgtgcacaggctgctgcacgagtctgattacgccgaggtggaccacattctgccctactccagatccttcgacgacagctacagaaacaaggtcctggtgctcaccaaagaaaaccgcgagaagggcaatcgcacccctatggaatacctggccgacaagcccgagcagaaagaaaagttcatcacatgggtcaagaccaccatcaaggactccaagaagcgcgagcatctgctgcggatcaagtactccgaagaggaagagaaagagtggaaagagcggcatctgcaggacacccggtacatcacccggtttctgtacaactacctgctgcagaacctgaagctggccgctggctacaccgatcggaagaagcgcatcaagcctatcaatggcgccgtgaccggctacatccggaagagactgggcatcagcaagatccgcgaaaacggcgatctgcatcatgccgtggatgccgttgtgatcgccgccacaaccgagagaatgatccagagagtggccaagtacagccggacaagagaaggctggcgcaagaagccccaagaaagagaggtgttccccgagccatggttcagcttccggaaagagctggaagccagagtcagcgagaaccccgaggaagtgattaagaacctgcatctgcccagctaccagggcgtgatggacattaagaaacccttcgtgtcccggatgcctcggagaaaagtgcggggagctgcccacaaagagacagtcagaagcggaaagctgctgaaagagggctacaccatctacaagaccgacctgagcgatctgaagctgaagaacggcgagatcgagggctactatcagcccgagagcgatagactgctgtacgaggccctgaagtcccggatcaaggacaccgaggaacggatcaaagccgaggtcgacaacaagaaagaacgggacgccaagctggccaagatcggccagattgccttcaagagccccttctacaagcccaaggccgatggcacaaagggccctctggtcaaaaaagtgaagatcatcgagaagtctagcctgaacgtgcccgtgcacaagggcaagagcgtggcctataacgatgtgatggtccgagtggacgtgttctgcgtggaaaaaaaggggaagaacaactactatctgatccccgtgtatgtggccgacaccgtgaagaacgaactgcctagaagggccatcgtggcccacaaaccttacgaggaatggaagatcatggacgacaaggacttcatcttttctctgtaccccaacgacctgatccacatcgtgtccgccaagaagatctccctgtctgccgtgaagggcagcaccctggaaagcaagatcgagacaaacgacgcctacctgtactacaaaaagaccaacatcagcaccggcgccatcagcgtgatcacccacgataattctcacgagatgggcagcctgggcgtcagaaccctgctgaagattgagaagtgcgtggtggaccctctgggcaacatctccctcgtgaaaaaagagaagcggcagagcttccggggatcc

SEQ ID NO: 243 - DNA, 3273 bp, synthetic construct
  misc_feature 1..3273: note = Synthetic sequence or unknown origin
  source 1..3273: mol_type = other DNA
ggtaccgagtttgcctatggcatcggcctggatatcggaatcgccagcattggttggagcgtggtggctctggatgccgacgctagaccttatggcctgatcaagctgggcagcagaatcttcgagaaggccgagcagcctaagacaggcgaatctctggccctgcctagaagaaccgccagaggcatgagaagaaggctgcggagaaaggccctgcggaagcaggatacctacaccttcctggaaaagtaccagatcgccgaccgggacaccatgcagagactgtttgatgccggccacctggaagatgtgtacgccctgagagttagagccctggacgaggccgtgaccaaagaagagtttgccagaatcctgctgcacctgatgcagcggagaggcttccagagcaacagaagaaatgccggcggagaggatggcgaactgctgagagccgtgaaagaaaaccgggcctgcatggaacagaacggctacagaacagtgggcgagatgctgctgaagaacgagagatttgccgctcacaagcggaacaaggccgagaactatctgagcaccgtgggcagagacatggtcaccgaggaagctagaatcctgttcgagagacagagagagctgggctgcgcttgggcttctccagaggctgaagccgagtacctgagcatcctgctgagacagaggaccttcgatgaaggacctgccgctccttctccttacgccggcaatcaggtggaaaagatggtcggaagatgcaccctggaacctgaccagcctagagcacctaagagctgcgccaccttcgagagattcaccctgctgcagaaagtgaaccacatccggctgatcgtgcagggcaagaccgtgcctctgaacgaggaacagcggcagattgtgatggaactggcctacaagagcgccgacgtggaccacgccaagattaggaaagccctgaatctggcccctgaagtgcggttcaacgacgtgcgatatcagggcgaagagaaggacttcgccaagtgcgagaagaaagagaagctgcccgctctgaaaggctggcacgccatctgtaaaaccctgggcaaagatgccgccgagaagctgagcgaagagacacgggacgagatgatccgcatcctgagcctgtacaagaacgacaccgccagaatcgagagactcatgcagctgggctttgacagagctgccgccgaagctctgtgcgagctgaatttttccggcttcggccacatcagcctgaaggcctgtagaaagctgatgccctacctggaaggcggcatgacctacgatcaggcctgtacagccgccggatacgatttcagagcccacaccggcaacgacaagggcaagtttctgcctgccgtgattcccgagatggaagatatcacaagccccgtcgtgcggagaagcgtggcccagacaatcaaggtggtcaacgccatcatcagagagcagggacacagccccgtgtacctgaatattgagctggccagagagctgcggaagtcctttgaagaacgggccgaaatggaccgcagcatgcagaagaacgccgcctacaacgagcagctgatgaaggaaatccgggaaaccttccacatcatcagccccaacggccaggacctggtcaagtacaagctgtggaaagagcaggacggcatctgcgcctactctggcgaaaaactgcacgccgaaagcctgtttcaggccggctatgccgaagtggatcacatcatcccttactccatcagcttcgacgacagctacaacaacaaggtgctggtgctgaagcgcgagaaccagcagaagggcaacagactgcccctggaatacctgaagggcgaaaagcgggatgagttcatcgtgcggaccaacagaatggtccgaaactaccggaagcggcagaacctgctgaaagagaaactgacagaggaagaacagcagggcttcaagctgagaaacctgcaggacacccagcagatggcccggttcctgctgaacttcatccgggactacctgcagttcgaggaacaccctgccgccggaaaacagagagttacagctctcggaggcagcatcacagcccacctgagaaagagatggggcctgagcaagatcagagaggacggggatctgcatcacgccctggatgccacagtgattgcctgtgccacacagggcatgatccaagagatcagcaactacagcaagcgcaacgagatgcgctttgagagagagtacatccaggacttcgacggcaacggctccatcgacagacggaccaaagagcactttcccgctccatggcagcacttcagagatgaggtggacatcagactgagcgacgcccctcaagaaggactgctgcatctgaaccccagattctacgccgagtactgcgtggaaaacgtgaagcccgccttcgtgtccagaatgccccacagaaaagtgaccggcgctgcccacaaagaaaccatcaaaggcgctaaggccctggatcagggcatcgtgacagtgaagagagccctgaccgagctgaccctggacaaaaaaaccggcgagatcgccaactactacatgccccaaagcgacgctctgctgtacaacgccctgaaagaaagactgcaggcctttggcggcaacgccgagaaagcctttgccgagcctttctacaagcccaagtccgacggaacaagaggccctctcgtgcggaaagtgaagctgtgcgaaaaggccaacctgatggtgcctgtgaatggcggatctggcgtggccaacaatgacagcatggtccgcatcgacgtgttctacgtgcccgacgatggctactactgggtgcccatctatgtggctgacaccctgaagcctacactgcccaatagagccgtggtggcctataagccctaccaagagtggcaagagatgaaggatgaggacttcatcttcagtctgtaccccaacgacctgatcgaggtggaacacaagaggaagctgaagttcacaatcgccaacagcgagagcagcagacccaagacactggaagtgggcaaagccctggtgtactacgtgtccggcaatatcagcgtgggctccatcaccatcaagacccacgatggcagctacgtgatcgcctccatgggcattaagaccctgaagtccatcaagaagttcgaggtcgacgtcctgggcaactaccacgaagtgaagaaagaaaaacggcagacgttccggaagaagggatcc

SEQ ID NO: 244 - DNA, 3276 bp, synthetic construct
  misc_feature 1..3276: note = Synthetic sequence or unknown origin
  source 1..3276: mol_type = other DNA
ggtaccaaatacgccatcggcctggacatcggcatcgagtctgtgggatatgccgtgctggaactggacagccacgaccagcctttcagaatcgagagactgggcagcagagtgttcgacagagccgagcatcctaaggatggcagctctctggccgtgcctagaagagaagctagaggcgctagaagaaggctgcggagacaccggcaccggctggaaagaatcagaggcctgatcctgagcagcggaatcctgtctggtgccgagctggatgccctgtataagggccagctggaagatatctacgccctgagaacaaaggccctggacgagctggtgtccagagaggcctttgccagaatcctgatccatctggcccagcggagaggctacagaagcaatagaaaagccgacgccgccgacaaagaaaacggtgttctgctggccgccgtgtccgagaaccagaagagatgcgaggaaaaaggctaccggaccgtgggcgagatgttctacagagatgaggccttcgccatctacaagcggaacaagcaggccaactacctgaacaccgtggacagagcctctgtggaagccgaggccagactgatctttgccgctcagagagaaagaggcgccgcttacgcctctgaagagacagaagccgcctacctggatatcctgctgagccagagaagcttcgccgaaggacctgcctgtggaccttacagcggcaaccaggtggaacggatgagaggcaagtgcacctttgaggaaggacagctgagagccgccaaggccagctacagctttcagctgttcaacctgtgccagcacatcaaccacatcagactgagcgccaagggcgtgaccagaagcctgaccgacgaagagagacagcaggtttacgagctggcccacgagaaggccgaagtgacattcgcccagatcagaaagctgctgcacctggccgaggatgaggacttcgtgggcattagatacgaagccggcgctagagccaaggccgagaagaatgccaagctgaaggatctcgagaactaccacaagatccggaagtgcatcagcgcctactctgccgaagccttcgctgagctgagctatgatcagctggacgccattggcgaggccctgagcaaaaatcagagcgacgccgatatcaccggcgagctgacagctgccaaactgagccctcaagtgattgaggccctgctgaccctgcctaacttcgccaagtttggccacctgagcgtgatggcctgccggaagattctgcctttcctgcagcaaggctacacctacgataaggcctgtgaagccgccggatacgaccctaaggccaacaatggcaagcccgagctgtacctgcctagcctgcctaagaaccagagcgagatcacaagccctgtggtgctgagagctgtgtcccagaccatcaaggtggtcaacgccatcgtgcgggaaatgcagggcagccccgtgtacctgaatatcgagctggctagagaactggcccatgacaagaaagagcgggacgagatcaagaaggcccaggataagaacgccgagacaaacgagcagctgatggaacaactgagagagtacaccgacggcaagatcggcggacaggacctgatcaagatgaagctgtggcaagagcaggacggcagatgcatgtatagcggcgaggccatcgagatcgagaggctgactgagcctggctatgtggacgtggaccacatcgtgccctacagcatctgcttcgacgaccggatggccaacaaggtgctggtgctgacagccgagaaccggcagaagggaaatagactgcctctgcagtacctgcagggaaagaagagggacgacttcatcatcagagtggaacagagcaacctgaagtacgccaagaagtcccggctgctgaaagagagcattagcgacgaggccgagtggaaacagcggaacctgcaggatacccagttcatggccagctatctgcaccggtacatctctgaacatctgctgttcgcccctagcgacagcggacggaagagaagagtgacagccgtgaatggcgctatcaccgcctatgtgcggaagagatggggcatcagaaagatcagagaggacggcgatctgcaccacgccgtggatgctgtggttatcggctgtatcacccagggcatgatcaaccggatcagccggtacagctactacaaagagacaaaggacaacggcgactacatcgtggatgagcagaccggcgaactgatcacaagattccctacaccttgggctcactttctggatgagctgtccatcagaatgacccagaacgccaaaaacatgcggaagcagctgttcgacgccaactacgacagctacgccgagatcgacctggaaaccgtgatgcctccattcgtgtcccggatgtgcaatcacaagagcacaggcagcgcccatctggaaacagtgcgctctggcaaactgctggaccagggcaaagtgatcagcaaggtggccctgacagccctgaaactggatgccacaggcgagatcgccaattactacaaccccgagagcgacagactgctgtacgaggccctcaaagaaagactgcaggcccacggcggagatggcaaaagagcttttgctgacggcgagttccggaagcctaaagccgatggaacacccggacctgtggtcaagaaagtgaaagtgatcgacaccgtgtccaatgtggtgcaggtccaggatcagacaggcgtggcaaacaacgagacaatgctgagatgcgacgtgttccgcgtggaagatgacggctactacttcgtgcctgtgtacgtggccgataccgtgaagcctcaactgccatctctggcccctattgccggaaaggatgccgacggcagaaaacgatggaaacagatgagagaagaggacttcctgttcacactgtaccccaacgatctgatccgcatctacagcaagaagcccttcagcctgaacgtggtcaacaagaagtctaccctgcctgagaagatgaccgtgcctggcgaagagggcgtgttcctgtactacaggggcatgaatatctccaccgccgtgctgaacgccatcacacacgacaacacctactctcacgacagcatcggcaagaccatgcagcggatcgagaagtacgaagtggacgtgctgggcaacatcagacggatcggagaggaaaagcggaaggacttcagccacaagaagaagggatcc

SEQ ID NO: 245 - DNA, 3276 bp, synthetic construct
  misc_feature 1..3276: note = Synthetic sequence or unknown origin
  source 1..3276: mol_type = other DNA
ggtaccaagagatacgccatcggcctggatatgggcgttgcctctgttggatgggctgtgctggccctggatgaggaagagaagcccatcggcatcatcgacctgggcagcagaattttcgatgccgccgagcagcctaagacaggcgcttctcttgccgctcctagaagagaggctagaggcgcaagaagaaggctgcggagacaccggcaccggaatgagagaatcagaggcaccatcctgagatacggcctgctgaccaagcaagagctggaccagctgtttgacggccagctggaagatatctacgccctgagagttagagccctggacgagcctgtgtccagacaagagttcgccagaatcctgatcaatctgtcccagcaccggggcttcagaagcaatagaagaaacgccgtggacggcgaggatggcaaactgctgacagccgtgaacgagaacaagcggatcatggaaaccgaggcctacagaaccgtgggcgagatgctgctgaaggacaagagattcgaggaacacaagcggaacaaaggcggcgactacatcagcaccgtgtccagagacatggtggaagatgaggtgcactgcatcttcgaggcccagagaaagtttggcgccgactttgccgataaggccctggaaagcgattacatcgagatcctgctgtcccagagaagcttcgatgaaggcccaggcggcaatagcccttacggcggaaatcagatcgagaagatgatcggcgagtgcacctttatcgagggcgagcctagagccgccaaggccagctacagcttcgagtacttcagcttcctggaaaagatcaaccacatccggctggtcaacggcaaagaaagcgtgccactgagcgaagcccagcggaagaaactgattgagctggcccacaagagcgacagcctgaactacgccaagatccggaaagagctgagcatcgacgacgactacaagttcaacatggtccgatacgacaagagcagcgagatcgtggaagccgccgagaagaaagaaaagctcgtgtgcctgaaggcctaccaccagatgagaaaggccatcaacagcctgagcaaggacctgttcgcccaagtgaccaaagagcagagaaacacaatcgccaccgtgctgagcctgtacaagtccagcgagaagatcgaagccgctctgagagccaagggaatcgagccttggctgattgacgccgccgacaagatcggcaatttcagcggctttggccacctgagcatcaaggcctgcgacatgctgatcccttacctggaacagggcatgaactacaacgaagcctgcgaggccgctggctacaacttcaaggtgcacaagtccgaggaaaagtccaagtacctgaagtgctgccaagaggacttcgaggacatcacctctccagtcgtgcggagatctatcgcccagaccatcaaggtgctgaacgccatcatccggaagcaggactgcagccccgtgtacatcaatgtggaactgggcagagagctggccaagaacttccaagagaggaacaagatcagcaaagagaacgaggaaaacaacaagaggaacgaggccgccatggaacggctgaagtctgagtatggactgctgaatgccagcggcaacgacctggtcaagttcaagctgtttcaagagcaggacggcatctgcccctatagcctgaagcacatccagatcgagcacctgtttgagcctggctatgccgaggtggaccacatcgtgccttacagcatcagcttcgacaacagctacaagaacaaagtgctggtgctggccaaagagaatcgcgagaagggcaacagactgcccatgcagtatctgaccggacagcggaaggacgacttcgtcgtgtgggtcaacaacaacgtgaaggactaccggaagcggcagaacctgctgaaagagagcatcagcgaggaagaaaagaagcagtggaaagagcggtccctgcaggacaccaaatacgccagcagattcatgatgaacctgatcaacgaccggctgctgttcgccgagagcaccaccggcagaaaaaagagagtgaccgccgtcagcggccagatcaccagcacacttagaagcagatggggcatcaacaagattagagagaacggcgacacccaccacgctgtggatgccgtggttattgcctgtgccaccgatggcatgatccagcagatcagcagaaacgtgcggctgcgcgagtgtcagtacatgcagcacgaaagcggaagcctggccatcgattctagaaccggcgaggtgttcagagagttcccctttccttggcctgacttcagacgcgagctggacgccagactggccaatgatcctgccagagtgatcaatgacctgaagctgcccttctacatgaacagcggcgagcccctgcctaagcctatcttcgtgtctcggatgcccaagcacaaagtgaccggcgctgcccacaaagaaaccgtgaagtccggcaagcacatcgaagagggcatcgtgctggtcaagagatccctgaaggacctgaaactgaagaacggggagattgagaactactacaaccccgacagcgacagactgctgtacgaggctctgaaggccagactgcaagagttcaatggcaacgccgagaaagccttcgccgagcctttctacaagcccaagagagatggcagccagggacctcaagtgaaaacagtgaagctggtggaaaagaccacactgaacgtgcccgtgcagaacaatcaggccgtggccgatcacgattctatggtccgagtggacgtgttctacatcgacggcgacggctactacctggtgcctatctatgtggccgacacactgaaggccgagctgccaaacaaagcctgtgtggccttcaagaactacagcgagtggaagcccatgagcgacgacaacttcgtgttcagcctgtacgccgacgacctgatccgggtcgagcacaagaaagagatgaagttcgccctgacgcacaaagagtccagcctgcctcctgagtacaacaccaaggacaagctggtgtactacaccggcatgaacattgccaccggcaacatcagcatcgagacacacgatggcgcctacaagattggcagcctgggcgtgaaaaccctgcggaagtttgagaagtacaccgtggacgtgctgggcgagtaccacaaggtggaaaaagaaaaacgcatgaagttcaatatcaagaacggatcc

SEQ ID NO: 246 - DNA, 3279 bp, synthetic construct
  misc_feature 1..3279: note = Synthetic sequence or unknown origin
  source 1..3279: mol_type = other DNA
ggtaccaacaaatacgccatcggcctggacgtgggaatcgcctctgttggatgggccgttgtgaagctggatgagagcgagaagccttgcggcatcctgaagatgggcagcagaatcttcacagccgccgagcatcctaagacaggcgcttctcttgccgctcctagaagagaagctagaggcgccagaagaagaaccagacggcaccggcaccggaacgagagaatcagaaacctgctgatcaacagcaacgtgatcagccagagcgagctggacaacctgttcaacggcaagctggaagatatctacagcctgagagtgaaggccctggacgaagccgtgacaagagccgagtttgcccggatgctgatccacatctcccagcggagaggcttcagaagcaacagaaaagaaggcgccagcgccgaggatggaaagctgctgacagccgtgtccgagaacagacagcggatggaagagaagggctacagaaccgtgggcgagatgttcctgaaggaccctctgttcgagcagagcaagagaaacaaaggcggcgactatatcgccaccgtggaccgctctatggtggaagaggaagtgcgcaagatcttcagcgcccagagaggatttggagccaagttcgccagcgaggaactggaaagcgcctacctgtctatcctgctgagccagagaagcttcgatgaaggcccaggcggcaatagcccttacgccggaaatcagatcgagaagatggtcggacggtgcacattctaccccgaagaacctagagccgccaaggccacctacagcttcgagtacttcaacctgctggaaaagatgaaccacctgagactggtgtccggcggcagcagcattacactgaacagcgagcagaggaccaagctgctggatatggcccacaagagcgagagcatcacctacgccaagatccggaaagagctgcccattcctgaagagtacaccttcaatctggtgcactacgccgacgacgtggccgtggaagagtccgagaagaaagagaagttcagctacctgaagtcctaccacaagatgcggaaggctctggacaaggtgtccaagggcagaatcgtgggcatgcctatcgagcacagaaatgccatcggcacagccctgagctactacaagaccagcgagaagatcaccgagtacctgaccgaggccggactggaaacagtggatattgatgccgccgaaggcatcggcaatttcagcggatttggccacctgtccgtgaaggcctgcaacgagctgatcccatttctggaacagggcatgaactacaacgatgcctgtgccgccgctggcttcgatttcaaagctcactctggcggcgagaagtctaagctgctgcacctgagcgaagaggacatggaatccatcacaagccccgtggtcaagcggagcatctctcagaccgtgaaagtgatcaacgccatcgtcagagatcagggcgagagccccatctacgtgaacattgagctggccagagagatgagcaagaacttcaacgagcggaccaagatcaagaaagaaaacgaggacaaccgggccaagaacgccgccgttctggaaagaatccagtccgagtatggctggcacaacgcctctggcctggatatcgtgaagatgaagctgtacgaggaacaaggcggcgtgtgcgcctactctcagaagaacatcagcctggaacggctgctggaacctggctacaccgaggtggaccacatcatcccttacagcatcagcttcgacgacagctacaagaacaaggtgctggtgctgaccaaagagaacagagacaagggcaacagactgcccctgcagtatctgaccggcgagcggagagataagttcatcgtgtgggttaacgcctgcgtgcgggacagcaagaagcggaaaattctgctgaccgagacaatcaccgacgacgacaagaagaagtttatcgaccggaacctgcaggacaccaagaccgccagcagattcctgctgaactacatcaacgacaacctcgagttcgcccctagcgactgcggccggaagaaaaaagtgacagctgtgaatggcgccgtgaccagctacatgagaaagagatggggcatcacaaagatcagagaggacggcgatctgcaccatgccgtggatgctctgacagtggcctgtaccacagacggcatgatccagcagatcagccggtacagcgcctacagagagtgcgagtactctcctacagatgtggccagcgtggcctacgatcctgataccggcgaagtgatccggcagttcccctatccttggcctaacttcagaaaagagctggaagccagactggaagatgaccccggaagagtgatcagcgagctgaagctgcctatgtacgagctgggactgatccccgtgcctgagaagcctatcttcgtgtccagaatgcccaaccggaaagtgtctggcgccgctcacaaggataccgtgaagtccccaagagcactggacgatggcaaggtggtggtcaagaagtccatcacagagctgaaactgaagaacggcgagattgagaactactacgaccccaacagcgaccggctgctgtacgatgccctgaagaagagactcgaggcctttggcggagatggcaaaaaagccttcgccgaggacttccacaagcctaagtctgatggcacccctgggcctattgtgaagaaagtgaaagtgtacgagcccaccacactgaacgtgtccctgcacgatggaaaaggcgtggccgacaatgacagcatggtccgaatcgacgtgttccacgtcgagaacgacggctactacctggtgcctatctacgtggccgatacactgaagcccgagctgcctaacaaagcctgcctggctcacaagccttacagcgagtggaaagaaatgaaggacgaggatttcgtgttctctctgtaccccaacgacctggtggaagtgtgccacaagaaagtcatcaccctgagcgtgtccaacaagggctctagcctgccagagacactgagcgacaagagcatgctgctgtattacacaggcgccgacatcagcacaggcgctattgctggcgtgacccacgacaatgcctacaaggctagaggcatcggaatcaagaccctggccagcatgaccaagtacaccgtggatgtgctgggcgagtaccacaaagtgggcaaagagaagagacagcccttcaacatcaagaggcggggatcc

SEQ ID NO: 247 - DNA, 3279 bp, synthetic construct
  misc_feature 1..3279: note = Synthetic sequence or unknown origin
  source 1..3279: mol_type = other DNA
ggtaccagatacgccatcggcctggatgtgggaatcgagagcgtgggctatagcgtgctggaactgaacagctacgacacccctagaaggatcgagtccctgggcgtcagaatcttcgacagagccgagcatcctaaggacggcagttctctggccgctcctagaagagaagctagaggcgctagaagaaggctgcggagacaccggcaccggctggaaagaatcagaggcctgatcatcagcagcgagatcctgaccaaggacggcctggaaagcctgtacgatggcgagctgagcgacatctacgagctgagaacaagagccctggatgagctggtgtccgccgaggatttcagcagaatcctgatccatctggcccagcggagaggctacaagagcaacagaaagtccgaggtgtccaacgaggaaagcgccggcaaaatcctgacagccgtgtccgccaacaagaagctgtgcgaggaaaagggctacagaaccatcggcgagatgttctaccgggacgagcggttcagcgagtacaagcggaacaagaacgacgactacagcaccaccatcgaccggcagtctgtggaagatgaggcccggatgatcttcaagagccagagagtgaagggcgccaagttcgccgacgagaagatcgagacagcctacctggatatcctgctgggacagagaagcttcgccgaaggacctgcctctggaccttacagcggcaaccagatccagcggatgagaggcatgtgcaccttcgaggccgatgagtttagagccgccaaggccagctacagcttccagctgtttaacctgtggcagcacatcaaccacatccggctgatcagaggcggagagacaatcgccctgaacgacgatgagcggaagctgatctttgagctggcccacgaagtgaccgagctgaactacgccaagatccggaagcacctgaagatcagcgacgagtacaacttcgccggcatcagatacgagcagggaaagtctgccgaggccgagaagaagtccaagatcaaggacctggaagtgttccacaagattaagaaatgcgtgaccgccgtgtctagcaacggcttcgaggaactgacacacgagcagctggatgccattggcgaggccctgagcaagaacatgagcgacgatgacatcctgaaggccctggaagaggccaagatctgcagacctatttctgaggccctgctcgagctgcccaatctgtctaagtttggccacctgagcgtgaaggcctgccggaagattatcccattcctggaaaagggatgcacctacgacaaggcctgtgaaggcgccggatacaacttcaacagcgtgaagaaagagctgaaggtctacctgcctcctgtgtccaagaacgataccgagatcacaagccccgtggtcaagagagccatcagccagaccatcaaagtgatcaacgccatcatcagagacatgagcggcgtgtccccagtgtacatcaacatcgaactggccagagagctgtctaagaactacaacgaccgcaacaagattcggaagtcccaggacgagaacgccaagaaaaacgaggaactcatggaacagctgaaagagtacggcggaacacctggcggccacgacatcatcaagatgaagctgtggaacgagcaggacggccggtgtatgtacagcggcgagacaattgagatcggcaggctgacagagcctggctatgtggacgtggaccacatcgtgccctacagcatctgcttcgacgaccggctggttaacaaggtgctggtgctgagcaaagagaaccggcagaagggcaatagactgcccctgcagtatctccagggcaagaagagggacgacttcatcgtgctggtcaaccagagccacctgaagtccgagaaaaagcggagactgctgatggaaaagatctccgacgagagcgagtggaagcagagaaacctgcaggacacccagttcatcagctcctacctgaggcggtacatcgacgagaacctgatgttcgcccctttctacgacaaccggaagagacacgtgatggccgtgaacggcgccatcacaagctatgtgcggaagagatggggcatcaacaaagtccgcgaggacggcgatctgcatcatgccgctgatgccgtggttatcggctgcatcagccaaggcatggtcaaccggatcagcaactacacctactacaaagagacaaaggacaacggcgactacgtgatcaatgaggaaaccggcgagctggaaacacggttccctacaccttggaagcacttcaccgacgagctgaatatcaggctgacccagaacaagaaaagcctgcagaaaatgctgttcgacgtgaactacgacagctactccgacgtggacatcgaggaaatcagacccctgttcgtgtccagaatgcccaatcacaaagtgaccggaagcgcccacgaggccacagtgaaatctggcagactcgaagaagtgggctacaccgtcagcaaggtgtccctgacaaagctgaagctggacaagaacggcgagatccaggggtactacaaccccgacagcgacaagctgctgtacgaggctctgaagaagcggctgctggaatttgacggcaacggcgaaaaggccttcggcaatatcgccttctacaagcccaagagcgacggcacacagggccctctggtcaagaaagtgaaggtcgaggacgtgtccagcaacatggtcaaggtgcagcaaggatctggcgtggccagcaacgatagcatggtccgatgtgacgtgttctacgtggaaaacgacggctactacttcgtgcccatctacgtggccgatacagtgaaggccgaactgcctaatctggcccctatcgccggcaaggacagcaacggccagaaaaaaaagaaagtcatgaaggctgaggacttcatgttcagcctgtaccggaacgacctgattcggatctacagcaagagcaccatcaccgtgaacaaagtgaaccagaagtccacactgcccgagaagatgaccgtgcctggcgaggaaggcctgttcctgtactttagcggcatggatgtgtccgtggccttcctgtctggcatcacccacgacaacacctacaagcaccggtccatcggcaagaccacactgtgcatcgagaagtatgacgtggacgtgctgggcaacgtgcggaaaatcgagaaagaggaacggaaggacttcctgaacagaaagcggggatcc

SEQ ID NO: 248 - DNA, 3279 bp, synthetic construct
  misc_feature 1..3279: note = Synthetic sequence or unknown origin
  source 1..3279: mol_type = other DNA
ggtaccatctacatcatcggcctggacgtgggcatctcttctgttggatgggccgtgatcagagtggacaaggactgcagaagaatcgaggacttcggcgtgcggatcttcgacagcggcgagacaagagacagaaagcagagcaagtgccaagagcggcggagctttagaggcagcagacggctgatcagacggcggaagcacagaaaggaccggctgaagtactttctgaacgagatcagcttcgtgaccgagaaagagatgaaggacttctacggccacaacaaccacgacatcatcgatctgagagtgaaaggcctggaagagagactgacccctgaggaactgaccgcctgtctgctgcacattgccaagttcagaggctacaagcccttctacgacttcgagaaagtgaacctgaaaaccgaggacggcaagctgctgctgcatatgaacgagacaaacaagatcatcgaggatggcggctacagaagcgtggccgaggccatccagaaggacagctacttcaaagaggaaaccaccggcagataccggttccacaacaagagcgacaagaacgacatcctgttctccaacggcatgatcaagaaagaggtggaaaccatcctgaactgccagaagcagtactacagccagctgagcgataagaacatcgagaagatcaacgatatcatcttcagcaggcgggacttcgaggacggacctggcaacagcggagacaagaatcggaagtacaccggcttctacgatagcatcggcaagtgccggttctacaaggacaagaaccggggctgcagattcacagtgctgggagatgtgttcgccctgatcaacaagctgagccagttcaaatacgtgtccatcgagacaggcgaggtggacaagatgcccaagaacctgatgcacaccatcatcatgaaggccatcaaggacgccagcctgaccaagaagggcatcatcaagatcgccaaagagcagggctttaccctggtgtccggcaacgaggaaaaggacgacaacaccgacatcaccaactgcctgaagttcgtgaagcccatgaagaagatctttgacgccgacgactccggcttcgagtgggagaaactgatcaacgaggaccccaccaacatggactccctgctgaatagaatcggcgtgctgctgagctacaacatcacccctaaccggcggctggaaaagctgaacagcatcagcgagatccgggacaacgccatcgtggaacggctgagcaaagtgaagctgagcggcaccgccaacgtgtccaatgagtacatgatcgacgccatcaacgccttcagagagggccagctgtacggcgatttccaggccaacgtgatcaaggatgacttcagctccgacaagaatgccaccagacacaagaagctgcctccattcaccaaggactccgagatctacgacaaccccgtggtgttcagatccgtgaacgagtgcagaaaggtcgtgaacgccatcatcgagagatacggcacccctagcgccatcaatatcgaggtggccagcgacctgaacagaagcgccgagaatagaaagaagctggccaacaaccagaagaagcggcgggataacaacgcctccgtgctgaagaaagtggccgatctgctgggcgtcgaggaaagcgagatcaccaagagccagctggacagattcaagctggccgagcaacaaggctggcggagcatgtactccggcgacaatctgtacagcgacgacaagggcaagatcaccgacaaggataagaaggccattatcctcaacaccaacaaggtgtacgagatcgaccacatcatccctttcagcagaatcctggacgactccctgaacaacaaagtgctggtgtttgccaaagagaaccaggacaagtccgacagaacccctctgatgtacctggaaggcgacagccggaaagagttcatcaagcgggtcaacagcttctaccagagcaagaacgagaacaaagagatcggcagcatctccaagatcaagtacagctacctgatgctggatagcctgacctccgaggaaaccctgaagtatctggaagagtggaagatccggaacctgaacgacacccggtacatgagcaagtacctgatgaagtatttcaacgacaacctgctgttcgaggaaaacaaggatagcaggcggcctcctgtgtatgccgtgaagggcgccatcacctctatgctgagaaagcagtggctgaacaagaaaacctggggcaacctggacaagaagaagctgaaaagcgtcaccaacctggatcacgccatcgatgccatcgtgatcggcaactgtctgcccgcctatgtggaaattgccgtggaaaacatcaagctgcgggacatctactacagcagcggcaagaagaaaaccgaagagtactaccgcagccgggacaccttcatcgataacctgtggaagttctacggcgtgcccaagagcgaaagcgccagactgctggaaaaaatgaccgagacacccagcctgattaacaacctgcggcaagaggtcgagtgtagagtgcaggattacggcaccatgcagttctttagcaaggacgataacggcaagaccaaagaagagtgggacgagatctatcggcggaacatcacaaacttctacgtgggccagaaagacttcgtggacagcatccagatgcctatcgtgtcccacaagcaggacaagagattccggggcaagattgccaacagcaacttcgtgaaaaccaccgacgatgtgtccaagttttacaagaagcagatcgacgaaaacaacttcgcctacatggacgaccggtcctactactgcgtggacgtgtacaagaaccacaaggggaacaccaagatcacagccctcaagtacaacgatattatcaagaagaacgggaagctgtacctgaagcaggactataagttccccgaggactaccgcgagcacctgatgtatctgtatagcggcgacttcatctccgtcgagaacaagaacagcaagtactacggctactacgtgtccgtgaagaacatcaaccggaatctgctgaacatcgacgagtgcttctacgaaaacaaagtgatcgactacaagaagaggattgagcgggccatcaccgagcggagcatcgtgaagaagtattacatcgacattctggggaagatcggcggggagatctacaagtgtggcgagcctctgagctacctgcctgagaaggatggatcc

SEQ ID NO: 249 - DNA, 3279 bp, synthetic construct
  misc_feature 1..3279: note = Synthetic sequence or unknown origin
  source 1..3279: mol_type = other DNA
ggtaccaaatacggcatcggcctggattgcggaatcgcctctgtgggatatgccgtgatgcagctggacgagaacgacgacccctgcagaatcatcagactgggcagcagagtgttcaacaaggccgagaatcctcaggacggcgcttctctggctgcccctagaagagaagccagaggcatgcggagaagaatcagacggcaccagcaccggctggaacggatcagatacctgctggtttctagcggcgtgctgagcaagaccgagctggataatctgttctgcggccagctgagcgacatctacatgctgagagccaaggctctggacgaacctctgacagccgccgagtttagcagagtgctgattcatctggcccagcggagaggcttcagaagcaacagaaagacagacgcccaggacaaagaggccggcaagattctgagcgccgtgtccgagaacaccgaggaaatggaaagaggcggctacagaaccgtgggcgagatgttctacaaggatgagaagttccggcagtacaagcggaacaagggcgacgattatgccgccaccgtggccagatctatggtggaagatgagatgcacaagatcttcgaggcccagagaagattcggcatgagctttgccagcaaggccctggaaacccagtacaccgaaatcgccctgagccagcggccttttgatcttggacctggcgccggacctaagaacgccccttctagatatgccggcgaccagatcggcagaatgatcggcccttgtacactgctgcccgaggaaaagagagcccctaaggccagctacagcttccaggtgttcaccctgtggcagaacatcaaccacctgagaatcgctgcccctggcaaagaggctcacggactgacagatgaacagagatgggccgtgttcgagctgtgccaccagaaaaaggacgtgaagtacacagccctgcggaagctgctggccctgagagatgatgagttcttcagcatcctgagctacggcgccaaagaagccgccgaagttgagaaggccgccttcaacttcctgaagccttaccaccagatcaagacagccctgaacaagctgggcaaagactacatcagaaacctgtccgccgatgagctggatgacatcggctacatcctgaccgtgcagaaaaccgacgacagcatcagacccgctctggaagagaagggcttcgcccctgaagtgatcgatgccctgctgagctgtggcagcttcagcaagtttggccacatcagcgtgaaggcctgccagatgctgatcccctacctggaaaagggcatgacctacgacaaggcctgtgatgccgccggactggatttcagagcccacagcaagacagagaagtccctgtacctgagcgccaacagcgactacctgtgcgacatcgtgaatcctgtcgtgcggagagccgtgtctcagaccatcaaggtggtcaacgccatcatcagagagcagggctgctccccaacctacctgaatattgagctggccagagagctgtccaagaccttcgatgagcggaagaaagccgagaagtccatgaaggacaacgccgcactgaactccagagtggtggaaagactgcagaccgagttcggcatcgtgtccccaactggcctggatatcgtgaagttcaaactgtggcaagagcaggacggcatctgcccctactctcagaagcccatcctgctggaaaagctgttcgctcctggctacgtggacgtggaccacatcatcccttacagcatctgcttcgacgactcctacaacaacaaggtgctgaccttcagcaaagagaaccggcagaagggcaacaagatccccatgcagtatctgaccggcaaggccagggatgactttgagatctgggtcgccaacaccatccacaacagagtgaagcggcagcggctgctgaaaaccgaactgaagcctgaggacaccgagggcttcaagacccggaacctgaacgacaccaagtacctgtccagggtgctgtacaacttcatcaacgacaccctgctgttcgccgacttcgccagcgacagaaaaaaacacgtgcgggccgtgaacggcaaagtgaccagctacatgcggaagagatggggcatctctaagatcagagccgacggcgatctgcaccatgctgtggatgctgccgtgatcgcctgtgtgaccgagcggatgatccagaaggtgtccacctacagcaagtaccacgagatctactacgtgtccgacgacgagaagtctttcgccgtggacttcaacggcgaagtgattgacgagttccctcagccttatccttacttccggaaagagctggacgccagaacaatggccgacgccaaaagagccgtgaaggactgcaggttccctcactactctgccgctcaagaggaagccgtgcagagctgctttgtgtccagaatgcccatgcacaaagtgacaggcgccgctcacctggacaccatcagatccggaagagaacccggcttcgtgatctctaaggtgccactggccaagctgaaactggacaaggacggcgagatccagaactactacaaccccgagtctgacacactgctgtataacgccctgaaagccagactggccgcttatggcggaagcggagaaaaggccttcgctcccgagaatggccccatgtacaaacctacagcctctggcgaacccggacctctggtcaagaaagtgaagatcatcgagaaaagcagcctgaacgtgcccgtgcgggatgagaatggcgtggccgccaattctgacatggtccgaatcgacgtgttcaagcccgagaacgatggctactacttcgtgcccatctatgtgtccgacaccgtgaagcccgagctgaccaacaaagcctgcgtggcctttaagaatgccagcgagtggaaagagatgcaagaggccgacttcctgttcagcgtgtaccccaacgacctgctgcggatcaacgccaagaaggacatcaagttcaccgtgtccaacaaggacagcagcctgcctaaagagatcctgcggaacgacgtgctggtgtactacaactccgccaacatccacaccgcctccattctggtgctgctgcacgacaacagctacagactggaaggcctgggcatcaagacactgctgagtctggaaaagtacactgtggaccctctgggcaactgcagcaaagtgggaaaagagccccggcagcggttcagaggatcc

SEQ ID NO: 250 - DNA, 4080 bp, synthetic construct
  misc_feature 1..4080: note = Synthetic sequence or unknown origin
  source 1..4080: mol_type = other DNA
ggtaccaagaaattctacctcggcatggacatcggcaccgagtctgttggcatggcctgcaccgacgagaactacaacctgctgagagccaagggcaaagatctgtgggccgtgcggctgttcgatgaggccaaagatgccagcgagcggcggatcaaaagaaccgctagaagaaggctgcagcggcggagacagagagtggaatttctgcagggcatcttcgcccctttcatggaagatgagctgttcttcatccggctgaacaacagcggcttcttcgaggaagataaggacgagcggctgagcagccagttcagcctgttcaacgagaaggactacaccgacatcgacttctacagagagtaccccaccatcttccacctgagacagaggctgtgttgcggcgagagagccgacctgaggcattattatctggccctgcaccacatcatcaagtaccggggccacttcctgttcgaaggcgaggatgtgaacggcatccgggacatcaagaagctgttcgagaattacaacaacgccgtggaagagatcgagatggacgacctgtacctgctggtggaaaaggccgaagagttccgcagcctggccatggaaagaaagggcctgaacgacaagaaaaaggccatcgtgaagctgtttaacgccacctctccacagctgaaagagatgctggctctgctgatcggcgccaaggccaagatgagcgtgatctttggcgaggaatacgaggaaaagtacaaggacgagaagatcagcttcaaagagattgacgacgacgcctttgagcagaagtccgagatctttgaggaagaacagttcgccatcctgaagcgggccagagagatctacaacttcatcgtgctggaaaaggtgctggaaggcaagggcacaatctctgaagccatggtggccctgtacgacaagcacgccgaagatctgaagctgctgaagaagctggtcaagcagaactacagcaaagaaacctactacaagatctttcggagcctgaaagagtccgccaattacgtcaactacgtgggctacaacaagaacaaggggaagaagatcaacgccagcaagaagtgcaagaaggacgagttctacgcctttctgaagaagaacctgaccgagatccaaggcgagggcgccgagatcctgaattacgtgaaggccgagattgagaacggcaccttcctgcctaagattctgaacgccgacaacggactgttcccacaccagatcaacggcatggaactggacctgatcctgcagaacctggccaagaactaccccgagttcgccgacaaggatgatagcggctttaccgcctgcgagaagattaagaaaaccttcctgtttaagatcccctactacatcggccctctgaacacagcccacgagaatggcggaagaggcaacagctggatgcggcggaaagagggcaagatcgagagaatcaccccttgggacttcgacgagatcgtggacaaggccgccagcaacgagcagttcatcagacggatgaccaacaagtgcacctacctgcacaaccaggacgtgctgcctaagggcagcatgtactaccaggccttcaacaccctgaatcagatcaacaagatcaagctggacaccgtgcctatcagcgtggaactgaagcaagagctgttccacaacctgttcctcaagaacaaaaagatcagcgtgaagcagatccgcgagtacctggtgctgagcggaagatgtacactggccgaagccaaagagctgagcatcggcggctttgataccgagatcggcctgaatgccaccatgagcagctaccggctgtttgccgataagttcggcgctatggtggacgagaaccctgagatcttcgagaacatcatcctgtggcacaccctcaacaccgacaagggcatcgtggaaaacctgattaagcagaagtacggcacgatcccgcagatcaaagaaaacatcaagtggctgaaggggctgacctcctttaaagagttcggccggctgtccaagaaactgctggatggcatcatcggcggaatcgatcctgccacaggcgaggcctacaccgtgctgaacagactgtacaacaccaactacaatttcatgcagatcatggaagtgtacgagtttgccaaggccgtcgaagaggaaaacagcggactgaaagaggaaatcacctacgaggacgtggccagcctgtacgtgtcacctatggttcgaagaggcatctggcagagcctgatcatggccgacgagtatgtgaaagccgtgggcaaagcccctgataagatcttcatcgaagtgaccagacgggacgaagagaagaagcggaccatcagcagaaagaacagcctgctggcactgtacgatcagatcggcgaggactgcgccaacatcgacgaactggtcaaagaactgaactgtgacgagatcaccgacagcaagctgcggcaagagcggctgtacctgtactttctgcagctgggcagatgcgcctataccggggagagaatcgaactgaaccagctggccaccgatctgtacgacgtggaccacatcgtgccccagagcatcacaaaggacgacggcatcgacaacaaggtgctcgtgaagagagtgaagaacgcccagaaaaccgacatctaccctctgcctctgggctttaccaaccagcagagcttctggaagctgctcaaaatcaagggactgatgagcgagaacaaatacgccaagctgaccagagtggaacctctgaccgaggacgacttcagagagttcaccaacagacagctggtggtcaccaaccagaccgtgaaagctgtggccgaactgctgaaggccaaatacggcgcctttggcaccaagatcgtgtacagcaaggccattcacgtggacgagtttaaacagaagaacgagatcattaagtgccgcgagacaaacgatctgcaccacgccagagatgcctacctgaacgtggtcgtgggcaacgtgtacgacaccaagttcaccagcgccatggactactactaccggaaggccgacgactcttggagagagtacaacctcaagaccctgttctacagacccatcgaaggcgcctgggccggcagcgaggacatcaacagaatcaagaaaatcgtggccaagaccagcatgtccgtgaccagatacgccgtgaccaaccacggggccttctacaacgagacagtgtacaagaaggatgacaacgccacatatccccggaaaggcaaggccccttacgaccagacagagaagtatggcggcttcaagagccctgccaccgcctactttgccattgtgaagtccaaggataagaagaacaacgttatcaagaccatcgaggctatccccgtgatggtggactatgccgtgaagaacaatcagaacgccatcatcgagtatctgcacggcatgggcctgatcgagcctgagatcatcgtgccgaaaatcaagatcaaaagcctggtgtccatcaacggctacaaagtgtggctggccggcatgaccggcaagcagattctgattcacaacgcccagcagtggttcaccaatagcaataccgacctgtatgtgaagcagctcatcaagctgatcgagagggacagagccggcagactgagcatcctggaaaaagagcaagagcagatccctctgatgagcaaccggttcaacgacaatctgtacgccaccaaagagagcaacctgcagctgtacgatgccatcattaagaccctgaacaagaatatctaccagggcctgagcagcgtgaaaagcttcgccctgaagattggcgagaagcgggacctgtttatcgccctgaccaccttcaaccagattaaggtgctgctgcagattatccggttcatgaagtgcaacgccgagtgcgctgatctgacactgcttgaagatggcgccacctgtggaaaactgctgattggcaagaacatcaccgacgtcgaatttgccatcatccaccagtctgcctgcggcctgacagagagagtgcagaagattggatcc

SEQ ID NO: 251 - DNA, 3300 bp, synthetic construct
  misc_feature 1..3300: note = Synthetic sequence or unknown origin
  source 1..3300: mol_type = other DNA
ggtaccgcctatgccatcggcctggatatcggaatcgcctctgtgggatatgccgtggtggccctggactacgaggaaaacccttggggcatcatcaacatgggcagcagaatcttcgacgccgccgagaatcctaaggatggcgcttctctggccgctcctagaagagaagctagaaccggcagacggcggctgcggagaagaaagcacagaatcgagcggatcaagaacctgttcctgaacacccagctgctgaccaaagagcagctggaaaagctgtacgagggcgtgctgtccgacgtgtacgagctgagagtgaaaggcctggatgagaagctgacagccgaagaggtggccagagttctgctgcatctggcccacagaagaggcttcaagagcaaccggaaggccgagaaaaccgacaaagagaatggcgccctgctgaccgccgtgtccgagaaccagaaacggatgaaggacaagcagtaccggaccatcggcgagatgttccacaaggatgagctgttcgccgagtacaagcggaacaaaggcggcacctatctgaccaccgtggccagggaaatgatcgccgacgaggccaagtacatcattgccacacagcggagcttcggcaacaagaccctgaccatcgagttcgaggaaagctacctggacatcctgctgagccagcggaactttgatgaaggccctggcggcaatagcccttacggcggagatcagatcgagagaatgatcggcaactgcaccttcgagaagtccgagaagagatgcgccaagagctgctacagcttcgagtacttcaacctgctgcagaagatcaaccacctgagactgctggtggacggcgtgaaggtggaactggatggcagccagaaaagcaaagtgatcaacctggccaagaccaaggccgacctgaagtacagccagatccggaaagaactcggcctgggcagccaggtgctgttcaatgccctggtgtacaacagcgacgtggaagaagtggaaaagaagtccaagttcaacttcatgcccgcctaccaccagattagaaaagaactggacaccgtggtcaaaggccggatcgaggccatcgacatcgatacactggacgagatcggcagaatcctgagcacctacaagagcgacgccaagagaatcgaggccttcagcaacctgaacatcaccagcaaggacatggaagccctgctcaacatcaacggcctgagaaagtttggccacctgagcctgaaagccctgaagaagatcaccccatttctggaacagggcatgatctacaacgaggcctgtacagccgccggatacgagtttagaggccacagcggctacgaaaagaccttcctgctgcctagccagaccgaagagatggaaaacgtgacatctcctgtggccaggcggagcatcagccagagcatcaaagtgattaacgccatcatcagagagcagggcgagagccctctgtacatcaatgtcgaactggcccgcgagatggccaaggacttcgacgagcggaagaagattaagaaagagacagacgagaatcaggcccggaacgagcggctgatcgagaagatcagaaacgagtttcacaagcagaaccccaccggcctggacctggttaagctgaagctgtgggaagaacaggatggcgtgtccccttactctcagaaacagatcgtgatcgagaggctgttcgagcccggctatgtggacgtggaccacatcgtgccttacagcatcagcttcgacgacaccatgaagaacaaggtgctggtgttcgccagcgagaaccgcgagaagggcaagaatctgcccgtggaatacctggccagaaaaaagggccagaaagccgtggacgacttcaaagtgtgggtcacctccaacgtgcggaactacaagaagcggctgaacctgctgaagtccgaagtgaccgaggaagatctgaacaagttcaaagagcggaacctgcaggacaccaagaccatcagccggttcatgtacaactacatcagcgaccacctgatcttcgcccctagcgagacaggcaagaagaaaagggtcaccgccgtgaacggcgccatcacctcctatctgagaaagcgctggggaatcaacaaagtccgcgccgatggcgataagcaccatgccgtggatgccctcgtgatcgcctgtaccaccgacaagctgatcaaggacctgagctaccacagccggtatctggaaatggaatacgaggccggcgagaaagaaagcctgtgggtcaacagaaacaccggcgagatcgtgaagcggttcccctatccttgggaagatttcagagccgagctgatggccagactgtctgatgcacctgaagtggccctgcggaaactgcagctgctgtactaccaggacaaggacctcagcaagatcaagcccatcttcgtgtccagaatgcctcggagaaagatcaccggcgctgcccacaaagctacagtgcggggagccagatatgtggacaagggcatcgtgatcagcaagaagtccctgagcgagctgaagctcaacaaaggtggcgagatcgagaactacttcgcccctgagagcgacagactgctgtatgaggccctgaaagaacagctgaagaagtttaacggcaacgccaagaaggctttcgagcagggattctacaagcctaaggccgacggcacccctggacctaaagtgaacaaagtgaaggtgtacgacaagagcaccctgaacgtggccgttcaacaaggcacaggcgccgctgacaacgattctatggttcgagtggacgtgtacaaggtggaaggcgacggctactacctggtgcctatctatgtggccgacacactgaagaaagagctgcccaacaaggccattgtgcagggcaagacctacgagcagtggaaagagatgagccccgaggacttcgtgttctctctgtaccccaacgacctgatcaagatcacgcacaagaaagaaatcaacttcagccgggtgtccgaggacagcacactggccgatagctacaagaccaaagaagagttcgtctactacaaaaagaccagcatctccaccgcctccatcagcatcattaacaacgacaacacctacacaatccccagcctgggcgtgaaaacactggccagcctggaaaagtaccaggtggacattctgggcaactacaccaaagtgggcaaagaaaagctgcagaccttcgccgcctatcagcaggccaagaaaaagcccggatcc

SEQ ID NO: 252 - DNA, 3303 bp, synthetic construct
  misc_feature 1..3303: note = Synthetic sequence or unknown origin
  source 1..3303: mol_type = other DNA
ggtaccaagcacatcagatacaccctgggcatcgacatcggaatcgcctctgttggatgggccgtgctgcagaatgatgtgtacggcgagcccgtgaagatcgacagactgggcgtcagaatcttcgagcgggccgagaatcctaaggatggcagttctctggccgctcctagaaggcaggccagaggctctagaagagtgatccggcggagaaagcaccggaaggaccggatcaagaagctgatcgccagcagcggcatgatggaacaagagcagatcgacaccctgttcaccgccggcagattcgagaagtccgtgtacgaactgagagtggacgccctggaacggaagctgagcgtggaagagacaatccggctgctgatccacttcgcccagagaagaggctaccagagcaacagcaagagcgaggaagccaaggacgccaaagaaaacggcaaagtgaagcaggccatcagcgacaaccggcagagaatgctggaacacggctacagaaccgtgggcgagatgttctggaaggacgacctgttcaagcggacaaaccctgatggctctgtggtgctggtggtgcacaatcagcccgacgactacaaagtgaccgtggaacggcagatgctgcgcgaggaactgcagctgatgtttgcccagcagcgcgcctttggaaatgagtgggcctctgaggcctttgagagcgcctatctggaaatctggggcagccagagaagcttcgatgaaggccctggcggcaattctccttatggcggaggacagatcgagcggatgctgggcacctgtaccttcgaagaggatgagcctagagcacccaaggccagctacaccgccgagtactttagactgctgcagaccgtgaaccacctgaaaaccgttggcagaggcctgcctcctgagttcctggacgaggaacagagaaagctggtggtcgagtttgccctggcctctcctaatggcacatacggccagctgcggaagaagctgtctctgcccgacgatgtgtacttcaacaacctgtactacggcaacaagagcgccgtggaagtggaaaagaaaaagctgggcctgatgccgttctaccacaaagtgcggattgccctggaccacgtgaagaagggcgccatccaagagtttagcgccgagcagctggacaagatcgccagaatcctgacactgtacaagagcgacgacaacagaacccagtacctgcggaaggcccagattcctgagcagtacattcctgaactgctggccctgtctgcctctaaggccgctcacctgtctatcaaggccatgcagaagatgatcccttacctggaagatggctgcacctacgataaggcctgtaccgccgtgtatggcagacacgatggaaagaagcccggcgagaagcggagccagaaactggatattggaatggccggcgagatcacaaacccagtcgttagaagggccgtgtctcagaccatcaaagtgatcaacgccgtcgtcagagagtacggccctcctgaggttgtcagagtggaactggccagagagctgggcaagccttacgagatccggaccaagctggaaaagcggcagagcgccaatttcgagcagaacgccgccatcagaagccagatcgaagagtacaagaaggacacccctaccggcctggacatcgtgaagttcaagctgtaccaagaacagaacggcgtgtgcctgtacagcggcgagaacctggatatcagcagactgtttgaggccggctacgtggacatcgaccacatcatcccttacagcatcagcttcgacgacagctaccacaacaaggtgctcgtgcggagcagagagaacagacagaagggcaacagaatcccctacgcctacttcggccaggacgaagtgcggtggaacagattcgaaaccctggtcaacacccagatcagaagcttcaagaagcggaagaacctgctgtgccacacactgagccctgagcagattgacggcttcaagcagaggaacctggtggacacccagtatctgagcagagtgatcttccggctgatcgatgagcacctggaatttgccgagacaggcaacgtgaagagaaagacccagacagtgaacggggccatcacagcccaagtgcggaagagactgggaatcgacaaagtccgcgccaacggcgatctgcaccatgccaaagatgccgccgtgatcgcctgtatctctcccggcatgatccagaagatcacccggtactcccagagatgcgagtgtgcttggacaagagccggatatgtggactacgaaaccggcgaagtgatgaccaaagaggcctacgacgagaagtacgcccctagattccctgctccttggcctcagttcagagccgaactggaagccagactgtctgtggaccctagaggcgagattgaccagctgaagctggccacctacgacagcgacgaagccctgtttcctgtgttcgtgtccagaatgcccaatcacaaggtgtcaggccccgctcaccaagagactatcagatctggaaagcaggctggcggcaccgtgtctaaagtggctctgagcaccctgaaactggacaaaacaggcgagatccccggctactacagacccgaggatgatcctctgctgtacgaggccctgaaagagagactgagagcctacgatggcaagggcgacaaggccttcgccgagcctttttacaagcccaagcacaatggcgagcctggacctgtggtcaagaaagtgaaggtgttcgacaaggctaccctgaccgtgcctatcaatcacggactggccgccaatggcaatatggtccgagtggacgtgttcagagtcgaggacgagggctactacttcgtgcccatctacgtggccgataccgtgaagggcgaactgccttgtagagccgtggtggcccacaaagctgtggaacagtggaaaggcatggacgagaaggacttcgtgttcagcctgtatgccggcgacctggtgcacattgtgaaccacaaggccatcaaactgaacctggccaagggcgccgagggaaatgaagtggccctgacaaacgacgccctgctgtactacacaggcctgaatattgccacaggcgccctgggactgaccacacacgatagaagatactgtcagagcggcctcggcggcaagacactggacctgattgagaagtaccaggtggacgtgctgggaaactacacacctgtgcggctgcccgagaagagaatgagattccagggatcc

SEQ ID NO: 253 - DNA, 3318 bp, synthetic construct
  misc_feature 1..3318: note = Synthetic sequence or unknown origin
  source 1..3318: mol_type = other DNA
ggtaccagcagactggtgtttgcctacgatctcggcatcggacagacaggctgggccgttgtggatgccgacagcagagatatcatcgagagcggcgtgaacaacttccctagcggagatgccgccgagaatcaagagagaagaggcttccggcagatgcggcggatgcacagacggaagaaaaccagaatggccgacttcgagaagctgtgggtgtccagcggctttagcgtgccaacactgagctacaccgacgtgctgagcctgagaaatagaggcctgagcgagaacctgaccgaggacgagatcttctacgtgctgcggttcatgctgaagtgccggggcatcagctacctggaagatgagctgaatgaggacgccaccggcgagtatgagagagctatcgccctgaaccagaaagagctgcagaacaagctgccctgccagatccagaaagaacggatggataagtacggcgcctaccggggcgagagagaggtggaaattgaaggcgagaaggtggccctgcggaacatctttaccaccgacgcctacaagaaagagatcgagctgttcctgcaggtccaggccagaggcaacaagaagatcaccgatagcttcgtgaagtcctaccaagagatcttcagccggaagagagagtactacgtcggccctggcaatgagctgagcagaaccgattacggcatctacaccaccatcaagaaccccgacggcaccttccacaccgacgagaatctgttcgacaagctgatcggcaagtgcagcgtgtaccctgaggaaagaagggccgctgccgcctcttacacagcccaagagttcaacgccctgaatgacctgaacgacctggtcatcaacggccggaagctggacgaggaagagaagcggctgatcatcgaagagtacaagagcagcggcgtggtcaacgtgaacagaatcctgaagaaggccatcggcgagaacatcgacagcatcaccggcttcagagtggacaaggacggcaaagaactgttccacaccatggaaatctatcggaagatggtcaagttcttcgtcgagaaaggcatggacatcaccaccttcagcatcgacgagctggaccggatcggagagatcctgaccatcaacaccgagaaggatggcatcatcaaggccttccagaacagctttgtgaagtgcgacgccaacatcgtggacgccttcgtggaatttcggcggaagaacgtgcggatgttcaccaagtggcacagcttcagcgtgaagatcatgagcgagctgatccccgagatgtacgcccagcctaagaaccagatggtgctgctgaccgacatgggcgtgttcagaagcagaagcgagcggttcatcgagtgcaaagagatccccatcagagagacaaccgaagagatctacaaccccgtcgtgcggagaagcgtgtccatggcctacagaatcacaaatgccctgatcgagaagtacggctacccctacaaggtggtcatcgagatgccccgcgagacaaacagcgacgaagagaagaagaagattggcgagatccagcgcaagaacgagaaagaactgagcaccatcattaagaagatccgggacgactacggcttcgagatcaaggacgaggacttccggaaccacaaaggcctggtgctgaaactgaaactgtggaacgagcaaggcggcaagtgtctgtacagcggaaaagagattcctatcgaccagctcgtgaagaaccagggcctgttcgaggtggaccacatcatccccatctccatcagcttcaacgacagccggtccaacaaggtgctggtgtacgcctccgagaaccagaagaagggcaacagaacccctctgagctacctgagcggagtgaatcgcgagtggaacgatgaggtgttcaccgcctatgtgaagtccctcggctacggcaaggacaagcaggactactccggcaaagagaagctgaagaacctgctgttcgccgaggatatcaccaagcaagaggtggtgcaagagttcgtgaaccggaatctgaacgacaccagatacgccagcagagaggtgctgaacaccctgaaggactacttcaaggccaaagaggccggcaccatcgtcagtgtgatcagaggcgccttcacacaccagatgagagtgaacctggaactgtccaaggacagggacgagagctatagacaccacgccgtggatgccatgctgatcgcctttagccagctgggctatgacgcctacctggccagacagaaacagatcatcgacttcgaaaccggggagatcctggacaaggcctcctgggagaagcaggacagcctgtaccggaaactggtgtaccaagaaacctggtatcagacccggatcaagatcaacgaggccgagaagcaagtgaagttttaccacaaggtggaccggaagtgcaaccgcagcctgtgcaagcagaccatctacggcacaagagagtacgagggcgacaaatacgtgatcgataagctggacctgtacgtgaactccgacgtggaccggttcagaaagatgatctccgatggcaaagaaaaggacttcctgatgtacgagaacgaccccaagaccttcgaaaacctgatgaccgtgttccaccagtacgagacagagaagaaccccttcgtggcctataacaaagaaaccggcgacttcgtgcggaagtacgccaagaaccataacggccccaagattgagaagatcaagttccggaaagaaaagctcggcagctgcatcgacatcagccacaaatacggcctggaaaaaggcagcggcagagtggccctgagaagcctgaagccttaccggatggacgtgtacagaaacaagaacaccggcctgtacagattcgtgggcctgaagcagagcgacatcaagtgtcagggcaacaactatgtgattgacgaagaggcctatgccaagatcctgctgtccgagaagatgatcgagtccggccagaccagaaccgacctgggagatagaggatgggagttccagctgagcttctaccggaacgacatcatccagtatgagaagaaaggcgtgatctacaccgagcggtttctgagcaggaccatgcctgaggactgcaactacatcgagacaaagcccatcgacgcccctgacttcaagaaacggaatctcgtgggactgagccagaccaagagcgtggaaaagatcatcaccagcatcctgggcaaccagcggaacgtgaagcgggaaaagttcagcgagatcgtggacaccatccggggatcc

SEQ ID NO: 254 - DNA, 3321 bp, synthetic construct
  misc_feature 1..3321: note = Synthetic sequence or unknown origin
  source 1..3321: mol_type = other DNA
ggtaccggcatcaccttcggctttgatctgggaatcgcctctgttggctgggccgtcgtgaacgatgattacgaggtgctggaaagctgcagcaacatcttccctgccgccaacgccagcgagaatgccaccagaagaggcttcagacagagcagacggctgacccggcggagaaagaacagaatcagcgacttcaagaagctgtggaagtccgccggcttcgatatccctgagggcagcaagacagacgtgctggaactgagaatcagaggcctgagcgagcagctgagcgacagagatgtgttcttcgtgctgctgaacagcctgaagcaccggggcatcacatacctggatgatgccgagtctggcgaccagagcagcgactatgccaagtctatcgcctacaacgagacagagctgaagtccaagctgccctgcgagatccagtacgagagaatgcagaagtacggcgcctaccggggcaacaacacagtggatgttgatggcgagcccgtgacactgcggaacgtgttcacaaagagcgcctacaagaaagaggtggaagccttcctgagcaagcagagcgagttcaaccctatgctgacagccggcttcatgagcgactacatggaactgttcagccggaagagagagtactacatcggccctggcaacgagaagtccagaaccgattacggcgtgtacaccaccgagctggatgagagcggcaagtacaagaccgaggccaacctgttcgacaagctgatcggcaagtgctctgtgtacaccgatgagcgtagagccgctggcgcctcttacacagcccaagagttcaacatcctgaacgacctgaacaacctcaccatccagagcgacagcagcaagctggaagatggcaagctgaccgagagcgccaagagagagatcatcgagcagatcaagaccgccaacgtggtcaacgtgaagcggatcatcggagatgtgctgggcgacaagaactgcacaatcagcggcgccagagtggacaagaacgagaaagagatcttccactccttcgaggcctacaacaagatgcggagagaactgagcgacgtgtacgacatcaagacaatccccagagaggacctggacgacatcggcgagatcctgacactgaacaccgaccgcgagagcatcctgaatgcctttgccatgaggggcctgaagtaccctcaagaggtggtggacgtgctgatcaaagtgcggaagtccaatggcgccctgttctccaagtggcagagcttcggcctgaccatcatgaaggaactgatccccgagctgtacgcccagcctaagaatcagatgcagctgctgaccgaaatgggcgtgttcaagaaccagtccgaccggttcatggaatacgaagagatccccgccgatgtgctgacagaagagatctacaaccccgtggtggccaagaccgtgcggatcacagttagagtgctgaacgccctgatcaagaagtatggcaaccccgaccggatcgtgctcgagatgcccagagataagaacagcgacgaggaacagcagcggatcagaaaagagcagcgggataacgagaacgaactcaacaatatcctggccaaagtgaagaaggactacggccgcgagatcaccaagaacgacttcatcaaccacagcaagctcaccctgaagctgaaactgtggaacgagcaggacggcgtgtgtccttactctggcaagcccatccacatcgacgacctgctggacaaccctagcctgttcgaggtggaccacatcatccctctgagcatcagcttcgacgacagccggtctaacaaggtgctggtgtacagcgaggaaaaccagaagaagggcaacagaaccccttacgcctacctgaccggcgtgaacagagactgggatttccacaactacatgtccttcgtcctggaccactacagcggagccctgaagcggaagaagagagacaacctgctgaacgacgaggacatcaacaaagtggaagtgctgaagggcttcgtgaaccggaacatcaacgacaccagatacgccagcaaggtggtgctgaactctctgcagcagtacttcgcctccaaggactgcaacaccaagatcagagtgatccggggcagcttcacccaccagatgagaatgaacctgcagctggaaaaagtgcgggacgagagctatagccaccacgccgtggatgccatgctgatcgcctttagccagatgggctacgaggcctatcggaaactgaccgaagagtacatcgactacgacaacgaagaggtcctggacaaggacggcttcaaccatctgctggatcgggacgaagcctacaaaaacgccctgtaccaggccaaatgggtcgccatcagaaagaccattcagaacgccgagaagcggaacaagtactggtatcaagtgaacaacaagtgcaatcgggccctgtgcaaccagaccgtgtacggcacaagagagatcgacggcaagacctgcaagatctccaagctgtccatccggaccgacgacggcatcaagaaactgaagggcattctggccaagggcaagcccgagcggttcctgatgagaagaaacgaccccaagacctttgagctgctgatggacatctaccagagatacgaggacgccaagaatccattcctgcagtacgaggaagagacaggcgagaagatccggaagtacagcaagaaaggcgacggccccgtgatcacctacctgaagtatgaggatggcgaggtggtgtcctgcatcgacatcagccacaaatacggcttcgaagagggctccaagaaagtgatcctggactctctgaacccctacaggatggacgtgtactacaacaacaccgacggccggtactacttcgtgggcgtgaagcagtccgatatcaagtgcgaaggggatgtgtacgccatcgacgccgaaaagtacacccggacactgatcaatgagaagatgctggaagagggccagacactggccgatctgcctaagctgggctatgagtaccggctgaccttctacaaagaggacctcatcgagtacgagaaggccggcgagattaagtgcgagagattcctgtccagaacaaagccccagagccggaactacatcgagacaaagcccaaggacgcccctaagttcgagaagcagaaccagtttggactggcccagaccaaccacatccggaagatcgtgaccgacatcctgggcaaccagtactacgtggaccagatgcggttcaacatggtggtgtctcggagaggatcc

SEQ ID NO: 255 - DNA, 3330 bp, synthetic construct
  misc_feature 1..3330: note = Synthetic sequence or unknown origin
  source 1..3330: mol_type = other DNA
ggtaccatcagccagagcctgaccttcagcttcgatatcggctacgcctctatcggctgggccgtgctggaagccaatcctgatggatctcaggacgccgatcctgtggtgcaaggatgcggaacagtgctgttccaggccgatgattgccaggccttcaagcggagaagctaccggcggctgagaagaaacatcagaagccggcggatcagaatcgagcggattggtagactgctggtgcagacccagatcatcacccagaacatgaaggacgcccctggacaccctgctccattctatctggcctctgaggccctgcaagagcacagagttctgagccctctggaactgtggcaggttctgcgttggtacgcccacaacagaggctacgacaacaacgccagctggtccaatagcagcagcgccgtggaaaacaaagaggacaccgagaagctgcggaacggccacgaactgatgaagaagcacggcacctgtagcatggccgagacaatctgcagagagctgaagctggaagagggcaagcaggatgcccctatgagctttagcacccctgcctacaagaccctgaataccgcctttcctagaagccacgtgcagaaagaagtgcggcagatcctggaactgagcgcccctcaaattcctggcctgacacctgagatcatcgagctgatcgtgcagcaagagctgttcaccaccgagcagagagagagactgctgcagttcggcatcaagctggccagaagatatcaaggcggcctgctgttcggccagctgatccccagattcgacaaccggatcatcagacggtgccccatcacatgggcccagatctatgaagccgagctgtctctgggcagcagcgagaagcaggccagagagaaggccgagaaactgagcaaggtgcccagcgccgattgccaagagttctacgagtaccggatggccagaatcctgtgcaacctgagagccgacgatcagccactgccagcttctctgagaaggcagcttatgaaggaagccctgaaagagggaaagctgaccaagagcagcctgaagaagatcatcagctctcaggccctgaccgagaacaccaacatcgacaactacttcaatctgcaccccgacagcgaagaggccctgtatcttgatcctgccgtggaagtgctgcagagaaccggaatccacgatgtgctgagccccagcgtgaagagaatggccctgacaagactgcggagaggcaagacctgcacacccagatacctgctgaaactgatgagatcccacggcgagcccgtggatcagcttgaggccaagatcgagaagagaagaatccagcagggcgagcgcaagaaaggcaaagaacacgtgccagccggcaaggactgggctgaagaacctctgctgcctaagtgtgctaccggcagagccccttatgccagacctgtgctgagaaaggtggtggaagaagtgctggccggcgaggacccttctagacctgccagagatgagaatcaccccgatggcgaagtgaaaacccaccacggctgtctgtactgcctgctggaccccaagagcaaagtgaacgagtaccagcggaaccggtccatcgacagcctgaccaacaatcacctcgtgcggcaccggatgatgatcgtggaaagactgctgaaggacctgatccaggacttcgccgctggcagaaaagaacgcgtggaaaaagtgtgcatcgaggtggccagagaactgtccagctttagcggcatggacagcaagaagattcaggccgagctgaacctgagacagaaaagccatgccatggccgtggaacggctggaaaaagatctgcctggactggccctgagcgccaacctgatcagaaagtgcagaatcgccgaggacatgaactggacctgtccattcacactgcagaagtacggccctcacgacctggacagactggaactggaacacatcgtgccctacgccttcagacagagcaatgccctgtctagcctggtgctgacctggaaagaagtcaacaagatgaagaaccggcggaccggctacgacttcgtggaacagtgtgaaggctctcccgtgcctggcagcaatctgagcatctgcagcatcaacaattacaagaccttcgtgaacggcctggacgagagaaagtggcacgccgacgaccagaagcggaagaagaagagaaaagccctgctgatggttcgaggcctgtccagcaaaaatcaggcccaggccaatatcggcatgaccgagggcatgatgacacagagcagccacctgatgaagctggccgccagagtggtgtctagaatcctgcctgacgtgtccatcgatatgatccctggcgctgtgacagccgccgtcagaaagtcttgggatgtgtccggctgcttcaaagagctgtgtcctgagctgagcggcaagatcaacaagcaggacctgcggagctgcacccatctgcatcatgctctggatgcctgcgtgctgggactgatcccttatatcgtgcccgctcacagaaatggactgctgcgcagagtgctggctatgagaaggctgcccgaagaactcatgcgggaagtccgccagatcgccgacaagagacactacatcctgaacgacgacggccggatcatgctgaaagatctccccaactccgtgaaagagaacatccgggaaaagctgatggaacagcgcgtgatcaagcacatccccgccaatatgagcggcgccagcctgaaagaaaccatgcagagagtgatcagcatcgaaggcaacggcgaggatgccatggtctgcctgagaaagtctagcttcatggtcggagaggacggcaagagaaccaccgtgaaggccaacaagctcgtgggcatctttcctgagggcagctccaagctgaaacccctgaaggccgccatcgagatcgacggcaattatggcgtggcactggacccctcacctgtggttattagacacgtgcgggtgttcaagcagatcctcgctctgaagaaaaagaacggcggcaagcccgtgcgcatcctgaagaacggaatgctgatccggctgacaagcccacaggacaccaaaagagaaggcatttggcggatcgccagcatcaaggacaacaaagtgggaatcgccctggacctgcagaggcctcattatgccggcagcggcagcaagaaacacgagagcaactggatcaacatccggctggtcaccctgcggaccaagtaccacctggaaattcaccccaccagctacaccggcaatcccagaggatcc

SEQ ID NO: 256 - DNA, 3339 bp, synthetic construct
  misc_feature 1..3339: note = Synthetic sequence or unknown origin
  source 1..3339: mol_type = other DNA
ggtacccacaaccggtacaccgagtacaagcccttcgactgcttcatcatcggcggcaagaccggcatcagaatggacaagtggaactacgccatcggcctggacatcggaattgcctctgttggttggagcgtggtggctctggatagccagggcgatccttacggcatcatcaagctgggcagcagaatcttcgacaaggccgagcagcctaagacaggcgaatctctggctgctcctagaaggcaggccagaggcctgagaagagtgattggaagaagggccctgcggaaagaggacatctacaagctgctggccaagcacaacatcgtgaccaaagaacagatgatggaaatcttccggaccggccacctggaagatatctacgagctgagaacaaaggccctggacgagctggtcaccagaaccgatttcgccagaatcctgatccatctggcccagcggagaggcttcaagagcaacagaaagagcgagagcagcgacgagggcaagctgaaggatgctgtgcggagaaaccagatcctgatggaagagaagggctacagaaccgtgggcgagatgttcgccaaggatgagctgtactcccggcacaagagaaacaagggcagcgagtacaccagcaccgtgctgagagataatgtgatcggcgaggccgtgctgatcttcgagtctcagagaagcctgggcaatagctgggcctccgaggaactgcaagagagctacatcgagatcctgagcagacagcggagcttcgatgaaggacctggcgagccttctccattccacggcaaccagatcagccggatggtcggaaagtgcaccctggaacctgaagagacaagagccgccaaggccaccgccagctttgagaagtttaccctgctgcagaagatcaaccacatccgggtgtccaacgaggacggcgagatggtgcctctgaacgtggaacagcggcagaaagtgatcgacctggcctacaagacccctgacgtgaccttcctgaagatccggaaagccctggaactgcacgagtacgacagattcaacctggccagataccggaccaccgactctgtggaaaaggccgagaaggacgagaagctgaagtgcctgaacgcctaccacgagatgagaaaggcactggatggcatcgagaagggccacatccagaagttcagcgacgaacagctgaacaaggccgccgagattctgacccggtacaagaacgactccaccgtgatcaacctgctgcaagaggaaggcttcagccccgaagaggctgatgctctgagcgtgctgagcttcagcaagttcggccacatcagcgtgaaggcctgtcggaagctgatcccatttctggaacagggcctgacctacgataaggcctgtaaagaggccggctacgacttcagaggccacaacagcgccaagagcatgtacctgcctgccaatactgagcagggcgctcctgagctgcaggacatcacaaaccctgtcgtgcggagagccgtgtctcaggccatcaaagtgatcaacgccatcatcagagagcagggctgtagccccgccttcatcaatatcgagctggccagagagctgagcaaggacttcgccgagcggaatcagatcaccaaggatctggaaaagaacaccgccgagaacgagcggctgaaagaagaactgctggaactggtgcacggcaagacaatcggaggccaggacctggtcaagtaccggctgtggaaagagcaggacggcagatccgcctacaacggcaagcctatcgagatcgagagactgctcgagcctggctacgccgaggtggaccacatcatcccttacagcatcagcttcgacgaccggcggagcaacaaggtgctggtctttgcctacgagaaccgcgagaagggaaacagactgcccctgcagtatctggaaggcaaagcccgcgaggatttcatcgtgcggaccgagacaaccgtgaagcagtaccggaagaagcagaacctgctcaaagagaagaataccgaggaaaccgccgagttccggcagagaaacctgaccgatacacagtacctggcagtgctgctgtacaacttcatcaccgatcacctggaatttgccgagggcaccgagtttggcaagcggagagtgtttaccgtgaacggcgccatcaccagctttctgagaaagagatggggcctcaccaaagtccgcgaagatggcgatctgcatcacgccctggatgccacagtgatcgcctgcaccaccaaccggatgatccagctgattagcggctactacgccaggatcgagggcacaccctacctgagcaagaagggcaaagagctgttccctcagccttgggaccacttcagagatgacctggtgctgcggctgagcgacacaatcacacctgagagcctgtacctcgtgaaccccgtgttctaccacagcttcggagccgagaacatcaagcccgtgatggtgtccagaatgcccagacacaaagtgaccggacaggcccacaaagagacactgaagggcactaaggccctgaaggacggctacctgaccaccaagaagtccctgagggacctgaaactgaacaaagacggggagatcgccgactactacaaccccgaaagcgacctgctgctctaccacgctctgaaagaacagctccagaagcacagcggcgacggcaagaaagcctttcctgagggcagccacttctacaagcctaagtctgatggcacccctgggcctgaagtgcggaaagtgaagctgattgagaaaagcaccctgaacgtgtccctgaacgatggcaccgcctttgccgataatggcagcatggtccgaatcgacgtgttcagagtgccagaagagggctactacttcgtgcccgtgtacgtggccgacaccaagaaaaagcagctgccctctaaggccgtgatcgccggcaagccatacagcaagtggaaagaaatggacgataaggacttcatcttcagcatctaccccaacgatctgctgtttttcgagcacaacaaggggatcaattggagcgtcaagcacaagaactccacactgcccaaccagaaagaggccaccgagctgtttggctactacatcaaggccggaatcgccacagccaccatctccatcatcaaccacgacaacagctacatgctgagcagcctgggaatcaagaccctgaagtctctgaagaagttccagatcgacatcctgggcaacatcagcgaagtgaagcacgagcggagaaccggcttcaatcagagaagtggcggaggatcc

SEQ ID NO: 257 - DNA, 3345 bp, synthetic construct
  misc_feature 1..3345: note = Synthetic sequence or unknown origin
  source 1..3345: mol_type = other DNA
ggtaccaagtaccggatcggcctggatatcggaatcgcctctattggttggagcgtgctggaaacagatgaggccggcgagcctatcagaatcgccgatctgggcgtcagaatctacgacgtgccagaagatcctcagaccggcgatagtctggctgctcctagaaggcaggccagaagcctgagaaggctgatcaggcggagaagccacagagtggacagagtgaagtccctgatctccctgaccttcggcgacgagattgtggccgagctggaaaagaacaagcccctggacattgtggccctgagagtgaaaggcctggacaacgagctgaccccttacgagatcagcagactgtgcgtgtacttcgtgaagcacagaggcttcagaagcagcaagaaggccggcagcaaggacaaggatgaaggcgtgctgctgaccgccaccagcgagaacagaaagaagctgatcgaaggcggctaccggtctatcggcgagctgctgtacaaagagtacagcggctacaccctgcggggcgacagagtgtacctgtacagaaacaaggacgggaagtacgacaacaccttcctgagagaggacctgctggccgagatcacccagatcctggacaagcagatcgagaagggcatcatcacccgggactttgcccagaagtacgccgagatcttcaccagccagcggagctttgatgaaggccctggcaagggcagcccttactctggaacatttgccatcggcctgtgcaccttcgagcggaagaatggctatgagagagcccctaaggccagctacaccgccgagtattctatcgccctgcagcggctgaacaacctgatgcctgttagaagaggcgagcagctgcctctgacagttgaacagagaggcgccgttctggccgaaatcgagaagtgcaaagagatcaagttcgacaagctgcggaagatcctgggctacgacaaggacgacagcgtgcggttcaatctgctgagctacagcaaggataagaccgtgaaagccgtggaaggcgccgtgttcgtgaccatgagaaacagctacgacatcagaaaggccctgagctaccacgacaaccccacacctgaactgctggatggcgtggcagagatcatcagcaagtacaagagcctggaccggcaagagagcgaactgctgaagctggacggcaccatcaccaacgaggaaatcgaggccatcggcaagctggatgccaccaagtttgtgcacctgagcctgtacgccctgagaaagatccagccttacctgtacgagggctacaagtacagcgaggcctgtgaaaaggccggctacaaccacagcgacttcagcggcgataagcggaagctgctgaaaggcgaggacatcaccgagctgatcaacgagatcggctctcctgtcgtgcggagagccttcagccaagtgatcaaagtgattaacgccatcgtgctgaagtacggcaaccccgtgggagtgaatgtggaagtggccagagagctgagcaagaccctggacgagcggaggaagatccagaaggacaacgacagccggcacgtggaaaacgagagactgaaagagcggatcagatccgacttcggcgtggaagccaaaggactggacatcatcaagctgagactgtacgagcagcagcggggcaagtgtgcctattctggcgagccaatcgacatcagcgccctgtttcacgatcctaccgcctatcaggtggaccacgtgatcccttacagcagaagcttcgacgacagcttcaagaacaaggtgctggtcaagacctccgagaaccagaacaagaaaaacatgatcccctacgagtacttcggcctcgacgagaagagatgggccgagtatgaagccagagtgggaaccttcgacttcccctacgccaaaaaacagctgctgctgcgcaagagcttcaccgaagaggacgagagcaactggaaggaccggaacctgaaggacacccagtacatcagcaggctggtgtacaacgtgatccagaactacctgctgttcgacgagagcgtgcaggccaagaaaaaagtgcgagccgtgtctggcggcatcaccagctacctgagaaaaatgtggggcctgaccaaagtccgcgaggacggcgacaaacatcatgccctggatgccgtggttatcgccgtggtcaccgacaaatacgtgaacaacatcagccggtacaacaagaacaaagagctgttcttcggagagaagggcgtgtacatcgactacgagacaggcgaagtgatcagccgggaagagttcgacgccagatacggcaagaaactgaaccctccttacggcgagttcgtggacgagctgaagatcagactgatggacgagtgcgaggaaaccgacctgtacggcatggtgcacaagggaatcagacagtgctacctggacaaactggccgagttcggctacaatgaggaacagctgaacgccgtgaagcccatcttcgtgtccagagtgcccaatagaaaggccaaaggcgccctgcacaaggccaccgtgtactccaacaagtacaacaaccccgagcacggcaaagtgatcgtgaagaaaacccctctgaaggacctgaaactggacaagaatggcgagatcgccggctactttagcctggccagacaaagcgatcccgctctgtatgaggccatcaaagagcgcctgaaggcctttaacaacgatggcaagaaagcctttgaggccgagtttcacaagcccaccaagagcggagaactgggacctgtcgttagaagcgtgcggacagaggaaaagggcagcatcggactgaccctcgaggccaaaaagggctacgtgaagaacgagagcatggttcgaagcgacgtgttctacaaagacggcaagtactacttcgtgcccgtgtacgtgaaggatatcgccagaggcgtgatccccaacaaggccatctctgccggcaaggactacgaggactgggacgagatgaaggaagaggacttcctgttcagcctgtacaagaacgacctgatcctcgtgcggatgaagaatgacatcagcctggtcaagccccggaccaaagagaaatacgccggcaagtctaaagagatgctgctctactacaaaggcgtggacagcagcaccggcaacgtgtccatcattgtgcacgacaactcctacgagggcagacccggactgaaaacagccctgagcatcaaaaagtacaccgtggacgtgctgggcaacgtgaccgagattaccaagaaagagaagcgggacaccctgggcaagaagaagggatcc

SEQ ID NO: 258 - DNA, 3348 bp, synthetic construct
  misc_feature 1..3348: note = Synthetic sequence or unknown origin
  source 1..3348: mol_type = other DNA
ggtaccaactaccggatcggcctggatatcggcatcggatctgttggctgggccgttgtctcttctgaaggcgacggacaccctgccagaatcgaggatttcggcaccagaaagttcaagagcggcgagaaccccaagagcagcgataccctgtgtagcgagagaagaggcttccggggcaacagacggctgaccagaagaagaagcttcagaaagaagctgctgctgaaccacttcaagaacatcggcctgctgaacaacaccttctacgacgactacgccgactgcaaggacgacgacgtgtactgcctgaaagtgaaaggcctggacgagaaactgctgcccgccgagctgtacaagtgtctggtgcacacctgtaaccaccggggctacagagacttctacgagcccgatgattccgacgaggaagccggaaaaaacgagagcgccgccaacgacttcgagaagatgttcatcaagtccggcaagcggaccgtgtccgagtacctggtgtctgatcacgtgtccaacggcttcgtgaactacagaaaccggaacggcggagccaatccttacctgctcgttcggagaaagctgctccaagaggaagtggccctgctgctcaagaagcagagcgagttctacagctgcctggacagccggaacaccaaccagatcatcaccatcatcttcaaccagcgggacttcgaggacggccctggcaatcctgatgacaagagcagaaggtactacggcagcctgggcaagtgccctttctacagcgtggaagataggggcttcagaggcaccgtgatcgccgatgtgttcgccgtgacaaacaccctgagccagtaccgctttgtgaacaaagagacaggcgagtacgagctggaacccaaggtggccgagaagctgattgaccatctgctggccaacgccaagctgagcatgaccgacgtgaagaagatcctgaaagaggaaggcttcgagctgctgaagtccgagagaagcgacgacaaggccctgggcaaagccatcaagtttctgtctatcgccaagaagtgcgccgaagaggccgagttcgactggaaagagctgatcaacgagtaccagttcgaccctgagatccccaccgtgctgcactctatcggcgagctgatctccaagtaccagacacctagcagacggcgcaaagagatgaagaagtctggcatcgacgagcggctgatcaagaccttcagcaacaagaagatcagcggcaccgccagcgccagctacaagtacatgtgtgacgccatcaaggcctttctgagcggcgacacctacggcaactaccaggccaatttcaagaaagtgaacgtggacagcgagaacaaagaaaagagcttcaagctggcccctagcgacattgatggcgccgacgtgcgaaacaacagagtggtgttcaaggccatcaacgagacacggaagatcgtgaacgccatcatcgatgtgtacggctccccagaggatatcgtgatcgaggtggcctctgagctgggcgagtctttcgagatgagagccagagagacaaagcggcagagagagaacgagaagtccaacgacaagatcaagagcgagatcgccagcctgctgagcatcgacattggagatgtgaagggcgccatgatcgagcggtacaagctgtacaaagaacaagagggcaagtgcgcctactctgtgcggcctctgggcgatatcaaagaagtggtggaaaacagaaaccacgcctacgagatcgaccacatcgtgccctacagcctgatcctggacaacaccctcaacaacaaagccctggtgtacacagaggaaaatcagaagaagggccagcgcacccctctgatgtacatgaacgaggaaaagagccaagagttcctgagcttcgtcaaccacatgttctccagaaagaccgacagcatcggccggaagaagttcgagtactaccggctggaaaccatctacggcgagaagtctgaggaaatcctgagcgcctggaagtcccggaacatcaacgatacccggtacatcaccaagtatatcgccggcctgtttgagcgcaagctgctgttctctggcgagaagaaacagcacgtgttcaccgtgaaaggcgccgtgactcagaaatttcggagagagtggttcaaggacagcgcctggggcgagtatgagaagaagagagacacctacctgaatcacgccctggatgccctgatcgccgccaatctgacaaagccttacatcgagatcggcagcgacgccctgagactgatcagcatctacaagtcccacaagagccggatcacccctgagtacgacgagtatctggaaaagtgcattgccaagatgcgcgagtactatggcttcaacgatgagtacaccagaaaactgctgagccggacaggcagagcccctagctttgtgcctagactggtggacgaagtccgcgtgcggttctacgatgaggacgaaaaggtgttcaacgagaacgtggaaaagctgtacggcaacgaggccggctttatcgtgcctcctcacatgcctatcaccagccacaagcaagagaagaagtacaagggcaagatcgccgacgagaaccctctgaagattgtggaaatcgacggcctgcctcacaagattaagcggatcgacatcaagtctgtgtccgagaaaaccctgagcaaggtctacaccgaggacaagtctctgatcggacagctgaccaccattctgaaaggcaagggcgaaaagtacacaatcgccgactacctgaaggacaacagcgaggaatacttcgtgtccaaagagggcaccctgatcagaaagatcagcaccgatggcggcgtggtgtccaacttctaccggaaagagatcgagaacgggaactacacatacctgggcatgctgaagtactactgcgtcgaggtgtacaaggactccaagggcaataccaagacctgcggcgtcagattcgtggacatcgtgaacagaaacgggaagctgtatcggaaagaagagtccctgcctggcgactacagcaagcacgtgatgtatctgttcgccaacgattacgtgaccatcttcgacggaaagggcgagacaaagttcagcggctactacatcagcgtcgagaacatcaatagcagcaagttcagcttcaaactgaagaactacagctccaacgtgatcaagtccatctccagagaggacaccatcaagaagttcagcatctccctgctgggaaagatcggcggcgagatcaagtgttccgagcctctgccttgcatcaaagagagagagtaccggggatcc

SEQ ID NO: 259 - DNA, 3369 bp, synthetic construct
  misc_feature 1..3369: note = Synthetic sequence or unknown origin
  source 1..3369: mol_type = other DNA
ggtaccaagtacagactggccctggacatcggaatcgcctctgttggatgggccgtgctggaacacgacgagaacgacaatccctgcagaatcgccgatttcggcgtgcggacatttgaggccgccgagaatcctaaggatggcagctctcctgccgtggatagaagggccgctagaggcctgagaagaaccgtgcggagaaagagagcccggctggacaagatgaagaaggtgctgagccagacactgctggacggcgccagcattgatttcagcccctgcgacatctacgagctgagagctatcgccctggaccggctgatcgaaaacaaccagctggcccggatcatctacagcatggccaagcacagaggcttcaagagcatcaagaaggccgaggaaagcggcaaagaggccagcaaactgctgggcgccatcagcgccaactccgacaacatcaagaactaccggtccatcggcgagatgtttctgaaggacgccaagtacttcgaggaacggaccaagaccgagaacggcaagatcatcagctaccgggtgtacaacatccggaaccacgccgacgacttcaagaataccctggccagagccgacgtgctgaacgagctgaagcagatcctgctgtctcagcagaagctgggcaacaagaagatcacccctgacttcatcaatcaagtgatcgacatcttcagcctgcagcggagctacgacgatggccctaatgctccttctcctttcctggtcaacttcaaagtgggcgactgcacattcttcccaagagagaagagggcccctaagggcagcctgagctacgagtactacaccatgctgaccaccatcaaccacctgagaatcaacggcctgagcctgaccgaccagcagagaaagatcctgatcgacgagttcctgaagaacaaagagatcaaggtcgagaaagtcaagaagctgctgaagctgaccgacaacgacaccttcaccggcaacagcaagtgcgacgacaacaagaaagtgctgctgaaacggatgttctcctacgacgccatgaaggccctgggcctcgaagataatcccctgctgcatgtggacctgctggatgagctggccctgattttcagcctgtacaagagcgacgaccggcggaagatgcagctgggaaagagcgagctgaccaagaacctgacctacagccagatcgacgaactgctcaagctggacatcaacaagttcggcaacctgtccatcaaggccatcaagattctgatcccttacctggaagccggcatgatctactccgatgcctgtgccgctgctggactgaaactgcctgagggcgagaagtccgtgaagctgaagtacaatcagctgcccgagatccaggacctgacatctcctgtggcaagacgcgctgtggcccagagcctgaaagtgatcaacgccgtgatcgataagttcggctccccttgcgccgtgttcgtggaactggctagagacatgagcaagaccttcgaagagagacaccggatcgagagagagcagaaagagaactacgccaacaacgagaagctgaaagcccggctcgtgaacgagttcggcattctgaatcccagcggcaaggacatcctgagactgaagctgtacgagcagcagaagggcaaagacatctacaccggcaagagcttccaggacgtgctgggactcgtgaaggccatcttcaacgataacaacacacagatcgaccacgtgctgcccttcagcagatgctacgatgacagctacaacaacaaggtgctggtgctggccgaagagaaccaggccaagggcaatagaacccctttcgagtacttcggcagcgacgagaagagatggaccgactacgtggaaagagtggaagccctgtttcctgacgacaagtccaagaagggaaagaagaaccccaagaaagtccggctgctgaacaccagcctgcaagaagatggcgccgaactggccagcagagccctgaatgataccaaatacgccgccaagctgatcaagtccctgatcgaggaccacctgatcttccaagagtccagcatgaagaaacggcccgtcagatgcgtgaacggcagcatgaccagctttctgcggaagatctggggcatcagcaaagagcggttcaaggacgatacccaccacgccgtggatgcctgtatcgtgggctgtgttggaaacggcctgctgcagaaagtgacaaagtacctgcagttcgagagctacaagaaactgcccgacggcagatacgtggacaagtctacaggcgagatcgtgcccgaggaaatcgtgaaagagtttgagcagaagaacttcaagttcccctatccgaccttcaaggatgaactgaacctgcggctgagcatcgtggaaaaccccaagtactaccagaaagaatttgagatgctgggctacagccaagaagagatcgacgccgtcagacccctgcacgtgtccagatctgtgaacaaaaaggccgacggggccatccacaaagaaaccgtgtacagcaaaaagctgctcaaccccgaagaggacaagtactttgtgaccaaaaagaccagcatcaagtctctgaagtacgacaaggacaaggacgagattaaggacttcccggaagagtacaagaaggctgaccccaagctgtaccagactctgctccagcggctgagagagtttaacggcgacgccgctaaagccttcgccgagcctatctacaagcccagcaagcccggcaatagccccaaccagatcaagacagtgaagctgcaggccaagatcagcgattgggttgacgtgcgaaaaggcgtggccgtgaacgactccatgatccgcatcgacgtgttcgagaagaaggggaagttctacttcatccccgtgtacgtgaaggatatgtacgccaagaagctccccaacaagatctggaagtccaccagctacaaggactggcctgagctggacgagtcttacagctttaagttctccctgtataagaacgacctgatcaagatcaagagcaaagagggctttaaattcacgcccaccgacaagaaagccgagaagattaccaccatcgagaacgatatgttcgtgtactatcagggcgccgacagaagcggcggcaagattagcgtggaaatcctgaatggcggcaagcagagcagaaccggcattcagaccctgctgaccttcgagaagtacgagatcgatgtgctgggcaatatcaccaaggctaagccagagaagcggaaagagttcaacaacgtcatccacaagtaccccagaatcaagccctctgccagcgtgtcccagaagggatcc

SEQ ID NO: 260 - DNA, 3390 bp, synthetic construct
  misc_feature 1..3390: note = Synthetic sequence or unknown origin
  source 1..3390: mol_type = other DNA
ggtaccgagaactaccagtaccggatcggcctggatatcggaatcgcctctgttggatgggccgtgctggaaacaaatgcccagggcgagcctaagagaatcgccgatctgggcgtcagaatcttcaccaaggccgagcatcctaaggacggcagttctctggccgctcctagaagaagcgccagatccgttagacggcggctgcggagaagaaagttcagaatccagagagtgaagggcctgttcgagagagagggcctgatcaccaagcaagagctggaaaagagcttccagaccaacgccgtggaaaacgtgtacgagctgagagccaaggctctggacagacggatcaccaatgaagaactggcccacgtgctgctgcacattgccaagcacagaggcttcaagagcaaccggaaggccgaggccaaggataatgagacaggtgccgtgctgagcgccatcagagagaatgagcaacggctgctggaaggcaactacagaaccgtgggagagatgatcgccaaggacgagagcttcagagaggacgccccttggaacgagaaccactacatcttcacccctcggaacaaggccggcaattacaagcacaccgtgctgcgggacatgctggtcaaagaggtgcactgcatcttcgaggcccagagaagctttggcaatgacgccgccagcgagaaactggaaaacgacttcatcgacgtgttcacagcccagcggagctttgatatgggacctggcggagagtctccctacggcggcaacatcattgagagaatgctgggcaagtgcaccttcgagaagaacgagcctagagcacccaagggcagctacaccgccgagagatttgtgatcctgcctaagatcaacaacctgcggatcaaggatagcgccggcagcgaaagaggcctgaccgaggaagaaagaaagctgctgctggccgagagctacaagagcaaagagctgaagtacaccaaagtgcgcaagattctggccctgcgggacgacgagtacttcaagggcctgaactacggcagaaaagaggtggccgacgtcgagaaggccacctttgtgaaagccaccgccacactgaccatcaccaagatcctggaagccaacggcgagtacgacttctctgatctggccgatggcctggatgagaagcgggcttttctggtggatgagatcgccagactgatcgccacctacaaagaggatgccaagcggcgggaagagttcgagcagttcgacctggacgacgaaaccgtggacaaactgctggaactgaacgacagcaagtttcagcacctgagcttcgtggccatgcagaaactgatgccctacctggaagagggctacacatacaacgaggcctgcgagagagtgggctacgacttcaaggatgagtaccacggcgagaagtttcacaccctgcggggcaatgagtttcagacgatctatcaagaggaactggccgacatcacaagccccgtggtcaagagagccatcagccagaccatcaaggtggtcaacgccatcatcgataagtacggcagccctcaggccatcaacgtggaactggctagagagatgagccggcctttcaacgagcggagcaagatggaaaaggatatgctggccaaccaggccaacaatgaggccatcctgaagcggctgagagaagagtatggcgtggcccatcctaccggccaggacatcattagattccggctgtggcaggaccaggacggaagatgtctgtactctggcgaggccattcctatcgatcggctgtttgccgtgggcgagacagacatcgaccacatcatcccttacagcatcagcttcgacgaccggctgagcaacaaggtgctcgtgaaggccaagtgcaacagagagaagggcaacagactgccctacgagtacctgggcaacaaccctgccgagtgggaagcctttaagagcagagtggacacctacgtgaaggacagcagaaagcggaacaacctgaagaaagagaaactgaccgaagaggaccggaagggcttcaaagagcggaacctgaccgataccaagttcgccaccgtggtggtcacccggctgctgagaaattacctggaaatggcccctatcgagggcaagcacaaacacgtgacagccgtgaatggcagcgtgaccgcctttctgagaaagagatggggcctgagccagaaggacaggcggacagatacacaccacgccagagatgccgtggttatcgccgcctgtacagatggcatgatccagaagatcacccggttcagccagctgcaagaactgaagcacacccgggacagaagaatcatcgaccccgataccggcgaggaactgaccttcgatgagaagtacgagcaagagtggctgaatatgtacgggaaacatctgcccacaccttggcctgagtttagagaggaactcgagctgcggatgatgccccatcctgaggatgtggtgctggacgaccctcggaagttcaaccagatcatcggctacaaggacgacctgtggggcaagccttacgagcagcctatcttcgtgtccagaatgcccaaccacaagaccacaggcgccggacacgccgagacaatcagaagcgctagactgtttgacagcgagggcgtcgtgatcgctaagacagccctgcaggacctgaagctggacaaagaagggcagatcgacggctactacaacaaagagagcgacagactgctgtacgatgccctgcttcggagactgcagatgtatagcggcgacgccaagaaggcctttcctgaaggcgaggacttccacaagcctacctctactggcgaagagggccccgtcgtgaagaaagtgaagatcatgaagaagcagacagccggcgtcagcgtcggaaaaggcggaattgctgagaacggcggcatgatcagagtggatgtgttccaagtgaacaagaagtactactttgtccccgtgtactacgccgacgccgtggccaaaagactgcctaacaaagcctgtgtggccctgaagcctaagtccgagtggaaagaaatggaagatcagttcttcgtgttcagtctgttccccggcgacctgttcttcttcaaacacaaaaaaggcatgaagatcaagtactacgacaagagcatgggctccgtgtctgaggccctgtgttactttaccggcgccaacacacacacagccagctttgccggcgacagcaacgacaaggtgttcagctttgaaggcatgggcatccagtctctggaagccctggaaaagtaccaggtggacgtgctggggaacatcaagaaggtggaaaaagaaacccggatgaccttccggggatcc

SEQ ID NO: 261 - DNA, 3402 bp, synthetic construct
  misc_feature 1..3402: note = Synthetic sequence or unknown origin
  source 1..3402: mol_type = other DNA
ggtaccgctcagaagtccagctacagccccaagaagtacagcctgggcctcgatatcggcacatcttctgttggctgggccatcctggacctggacaaagagagaatccacgacctcggcgtgcggatcttcgaaagacctgaagatccccagaacggcgacagcctggccaagcctagaagagatgccagaagcgccagacggcggctgaagagaagaaggcagagactgaaccacctgaagcagttcttcgtggaccagaacatcctgaccaaggaccaggtggaagaggtgctgaactacaagagcgacttcaacaagctggacgtgtacgacctgagagccaaggctctgacagaggaactgagccccgaggaactgctgaaggtgctgtaccagatcaccaagcggagaggcttcaagagcaaccggaaggtggtggaagaaagcgacaaagaaggcggcagagtcacaagcgccctgaaaacaaacgagaagttcctggccgacaacaactacaccacagtgggcgaagccctgagccgggatgagaagtttgcccctcacaagcggaacaagcgggacgactacaccaacagcttcgccagagatgacttcctgcacgagctggaagccatcatcaagacccagcggaactacgccctgaagaatgtgcccgagcctgccatcaatgagctgatctacggcatcgacgacggccaagtgaccaacgtgtccgccatcatgtaccagcggcctttcatgaccaaagaactgatcgagaagatggtcggaaagtgcaccttcgaggacggcgagaaaagagcccctaaggccagctactccttcgaggtgttcagactggccagcgatctgagccacctggtgttcatccctcgggatgcctctaagagacaggccaagcgcgaaaacctggaagtgcggctgagcccagagcagatcaagcaagtgatcgagctggccaagagccagaagtccctgacctacaagaaagtgcggagcacagccggcatcagcgaggattatgtgcctaaggatgtgcggggcaagaagaaagacggcgacgagttcggcgaggaaaatgtgtttggcggcctgaaggcctacaacgacattcggctggccctgaaggatctgcctgaggactgggccaagatcgacaacgagagcgccatcaaccagatcgcctacacactgaccacacagaaggccgacgagggaatcagagccgagctggatacactgcctctgagcaacaaggccaaagaggccatcgtcaagatcaagcccaccaactttagagccttcggccacctgtctatcaaggccctgcagaagatcacccctcacatcctggaaggcatgacctacgataaggcctgcgaagccgccggatacgatttcaagaagcagagcgccagcctggaacagatcacaaaccccgtggtcaagcgggccatcacacagacactgaaggttgtgcgggccattgagaggaagtacggcaagccctacttcatcaaggtggaaacagcccgcgacctggccaaaaacttcaaggacagaaaggccatcgagaacgagaacaaagagaatcagacccggaaccagagcatcattcagaccctgaacgagaatggcatcgtgaccccaaccggccagcagatcatcaaagtgaagctgtaccgcgagcagaatggcgtgtgtctgtacagcggcaaggccattgacttcgagacaatgctgtgcgacgacaacgcctatcaggtggaccacatcgtgcctttcagcagaagcaacaacgacggcatcaccaacaaggtgctggtgctgaccgaggaaaaccagaagaagggcaaccagacacctttcgagtactttggcgccgacgagaagcggtggaaagagtttgccgccagagtcgagagcacatacaagaccagagatatcaagaccgccgacaaggccaccaacgccatcaattacaagtacaacggctatgccctcaagaaaaagcagaacctgctgctgcaggactacaagaacgatagctggaacgtgcgggccctgaatgacacccggtacatcacccggttcatccagaactacctgcggcagatggtggactttgccgagggcgaagagaaacagagagtgatcgcccctaacggcaccaccacagcctacctgagaaaaagatggggcctcgccaaggatagagccgaggatgtgctgcaccatgccaaagatgctgccgtggtggccgccatcgataattctattgtgcggcaggccaacctgttcgccaagagaggcgaaattgccgctctgctgtccgccgtcaagaccatggaagagaaaaccgacaagctgaccggcgagatcgtggacgaggatgagttcgatcgggcccagagaagaaaggacgccgccattgtgctgagcagcaagcacttccctcagccttggaacgacttcggcaaagaagtgatgaagcgcaccctgaacaccgatatcgccacactgcagaacgagctgagaggcctggacaactacgacgaggacttcagactgagcgtgaagcccatcttcgtgtccagagagatccggcacaagatcagaggcgaggctcacgagagcaagctgcggagcaacagaaaccggaacggccagaatatcatcagaatccctctgaccgagctgaccctgcagaggctggaaaacagcctggtcaaagaagagttcgacagccagaagaacagcaacggcagcagcctgtatgagaagctgctggcccggctgaacgagtgcaatggcgatagcaagaaggctttcaaccctccgttcaagctgtacaagggccccaagcaggacaagaacggcaaccctatttctcccgtggccgccgtgaaggtgtacgacaagaaaggcgtggtgtccgtgggcagaaaggctaatgctcctgtggctctggccgagatggtccgaatcagagtgtacaagaaggacaatcagatctacatgatccccgactaccggatcaacatcctcgaaaacaaagaaaccatggaactgctcaagccgctgaagaaggtgtccaagattgacaatagcttcaacttcatcggctacctctacaagggcgacctgatcaccatccagaaggactcccagacctttatcggctacttcgtgcagttcgagggcgacaacagaatcaccatcaaaaaccacctggccgtggacagcagcagagacagcaagagcacagtgaagagagagagcctgagcggcatcaactacctgaaaatccacaaagtggacgtgctgggcgacgtgaactttagcgagggaatagtgtggccaggcgcctctggatcc

SEQ ID NO: 262 - DNA, 3405 bp, synthetic construct
  misc_feature 1..3405: note = Synthetic sequence or unknown origin
  source 1..3405: mol_type = other DNA
ggtacccagatctacgtgttcaaggacatcccctacagcggcaagctgtacaccgacaagcccgagacaaagtacaccctggaagagatgaagatgggcgtcagattcggcctggatatcggcgtggcatctgttggctgggccgtcgtgaacgacaactatgaggtggaagaggccggcagcaatctgtttaccagcgccgacgccaaccagaacgtggaaagaagaagcttccggcagaccagacggctgcacagaagaagaggcaaccggatcaacgacttcaagaagctgtggctgaacaccggcctgcctattccagccacaaacatccccgacatgctggaactgcggaacagaggcctgaacggcagactgagcgaggaagaaatgttccacgtcctgaagaacgagctgctgcacaggggcatcagctacctggatgatgccacagatggctctgagacagcccagggcgattacgccaagggcatctcccagaaccagaaagagctggactccggcaagttcccctgcgagattcagagcgagagactggataagtacggcaagtaccacggcaacatcagcgtcggcaacggcgaggaaaagatcatcctgagcaacgtgttcaccaccggcgcctacaagaaagagatcctggccatcctggaacagcagaagaagttcctgggcttcctgaccgacagcttctgcgagaagtacatcgagatctttctgcggaagcgcgagtactacacaggccctggcaatgagaagtcccggaccgactatggcaagtacaccaccagaaccgacgagacaggcaagtatatcaccgaggacaacatcttcgagaagctgatcggcaagtgcagcgtgtacaagcacctgacaagagccgctggcgccacatacacagcccaagagttcaacctgctgaacgacctgaacaacatcaccgtgaatggcagaaagctgagcaaggacgagaaagaagtgatcatcaacgaagtgaagaacgccaacagcttcaacatgcggaagatcctgaaaaaggccatcggcgaggacatcgagacactgacaggcgccagactggacaagaatgagaaagaggacttccacaagttcgcccagtacaacgccatccggaaagagttcgagaagaacggctgggatatcaccgtgctgagcagagaggaactggactccatcggcaacgtgctgaccctgaataccgaaaaagaggccattctgaacggcttcaagagagagggcctgagcctgaccgaggaaatggaaaactgcctgatcagcctgagaaagcagaagtcccctctgttcagcaagtggcagagcttcagcctggacattatgctcgagctgatccccggcctgtacgagcagcctaagaaccagatggaactgctgaccgatatgggcatcttcaagagcaacaaggacattttcaagaactacagcagcatccccgccaatgccatcctcgagaacatctacaaccccgtggtcacccggtccatccggatcaccatccagatcatcaatgccctgatcaagaagtacggctaccccgaccagatcattatcgagatgccccgcgacaagaacgaagaggaagagaaaaagaatatcgccgagcggcagaagaaaaatcaaaaagaactggacggcatcatcaagaagatcagcagcgagtacggcatcaagatcaccgagcaggatttccaccagcacaagaaactggtgctgaagctgaaactgtggaacgagcaaggcggcaagtgtccctactccggcagaaccatcaacatccaggacctgctgtacaaccccagcctgttcgaggtggaccacatcatccccaagagcatcagcttcgacgacagccggtctaacaaggtgctggtgtactccaccgagaatcagaagaagggaaacacgaccccttacaactacctgcggcacctgagcggcaactggggctacaaagaatacttcgactacgtgtgccggctgcggaaggacaatatgatcaacaagcgcaagatggaaaacctgctgttcacagaggacatcaacaagatcgaggtcctgaagggcttcatcacccggaacatcaacgacaccagatacgccagccggatggtcctgaacacactgcagggctacttccaggccaaagaggcccctaccaagatcaaggtcgtgcggggcagctttacccaccagttcagaaacaacctgtacctggaaaagaaccgggacgagagctacagccatcacgccgtggatgccatgattatgtgctactcccagatgggcttcgatgagtaccacaagctgcggagcgagatcatcgacttcgaaaccggcgagattctggacatcaagcgctgggaagaagaagtgaacgagaaaacctacaatgagctgatctaccagaacaagatgatccagatccgggccaatatccagaaggccgagaagaaagtcaagttctggcacaagcgggacagcaagcccaacagaggactgtgcaatcagaccatcagaggcaccagaaacgacaacggcgttatcaagaaagtgaacaagctgaatatctacgaccccagcggcgtggaaaccctgaagaagatgattaacaacggcaagcaggactgcttcctgatgtataagcacgacaagcggacctgggagaacatgctgcagatcatggaagattaccgcgagactaagaaccccttcaccgagtacgagaacgagactggcgactacctgaggaagtacagcaagaagcacaacggccccagaatcgtgaaactgaagtacctggacggcgaagtgggcagctgcatcgacatctcccacaaatacggctttgaaaccggcagccgcaaagtgatcctggaatctctgaagccctaccgcatggacgtgtactacaacgagaaggaccagaagtactacctgatcggcgtgaagtactccgacctgaagttcaacaagggcacctacatcattaacgaggccgcctacaacaagaccctggtgtccgagaaactgatcaagcccggccagaccatctccgatctggaaagactgggctacaagttcatgctgagcttctacaaaaacgagatcattgagtatgagaaggacggggagtactataccgagcggttcctgagcaggaccatgcctaaggccagaaactacattgagacaaagcccctggacgcccctaagttccagaagcctcagaagcagatcggactgagcaagaccaccagcattaagaaagtgcggctggatatcctcggcaaccggtactactctggccaagagaacttcaagctgaccgtcgacatcaacggatcc

SEQ ID NO: 263 - DNA, 3417 bp, synthetic construct
  misc_feature 1..3417: note = Synthetic sequence or unknown origin
  source 1..3417: mol_type = other DNA
ggtaccgacgagaagctggactacagaatcggcctggacatcggaatcgcctctgttggatgggccgtgctgcagaacaatagcgacgatgagcccgtgcacatcgtggacctgggcgtcagaatcttcgacaaggccgagattcctaagaccggcgaatctctggctggacctagaagggccgccagaagcacaagaagaaggctgcggagaagaaagcaccggctggacagaatcaagtacctgctgagcgaggaaggcatcatcgacatcgaggccttcatggccagataccacagcgagaacctgcctgacgtgtaccagctgagatacgaggccctggatagaaagctgagcgacgacgaatttgcccaggtgctgatccacattgccaagcacagaggcttcagaagcacccggaaagccgagacagccgccaaagaaaatggcgctgtgctggcctccaccagcaagaatcaggccctgatgcaagagcaccactacagaaccgtgggcgagatgatgtacctggacgagagcttcagaatcaactgcccttgggtcgagagcggatacgtgctggcccctagaaacaaagccgaggactacaggcacaccatcctgagatccatgctggtcgatgaggtgcacgccatctttgaggcccagagaaccctgggcaataccaaggcttctccacagctggaagagaagtacctgaccatcatggaaagccagcggagcttcgatatgggccctggactgcaacctgatggcacaccttctccatacgccatggaaggctttgccgacagagtgggcaagtgcaccctggaaaaagaagagatgagagcccctaaggccgcctacaccgccgaatattttgtggccctgcagaagatcaaccacaccagactgatcgacgccaacggcgaagtgcggaatttcacagccgaggaacgcgagtgcctgatcgatatgctgcaccaccagagagagattaagtacgccgctgccagaaaggccctgaagctggataccaacatccggttccagaacctgaactaccggggcaagaaaaacgacgacgccgccgataagatggccgaaaccgagaaggccaagttcatcggcatgcccaactaccacgactacaagaaatacctggccaaccggctgcacgagatccctgagcctacagagcaagagctgctggatgagatcggcagaatcctgacctgctacaagaacgacgacacccggctgaaatatctggccgaactgggactgaccgccgaggaaatggatagcctgctggccttcacacccgccaagttccagcacctgtccatcaaggccatgcggaagatcatcccttacctggaagagggctacacctacgataaggcctgtcaagaggccggctacgacttcaaagccgacggcaatggcaccaagaacaagctgctgaagggcgacgccgtgaacgagatcatcaatgagatcacaaaccccgtggtcaagcggagcgtgtcccagaccgtgaaagtgatcaacgccatcatccagagatacggcagccctcaggccatcaacattgagctggccagagagatggccaagaccttcgatgagcggcggaagctggaaaaggacatgcaagagagacagagcagcaacgacaaagtgaaagagcggatcaaagaactgggcgtgatcagccctaccggccaggacatcctgaagtaccggctttgggaagaacaaggcggcagatgcatgtacagcggcaaagtgatccctatcgccgagctgtttgacagagccggcggatacgacatcgaccacatcctgccttacagcatcaccttcgacgacagctaccggaacaaggtgctggtcacagcccaagagaaccggcagaagggcaacagaaccccttacgagtacatgtgcgaggacgaggaacggctgaaagagttcgaagtccgcgtccggaccaccatcagagattaccggaagcaagagaagttcctcaagcggcacttcaccgaggaagagaaaaaagagttcaaagagcgcaacctgaacgacaccaagtacatcaccaccgtggtgtacaacatgatccgccagaatctggaactggcccctttcaacaagcccgggaagaaaaaacaagtgcgggctgtgaacggcgccatcaccagctacctgagaaaaagatggggcatgcctcagaagaaccgcgagacagatacccaccatgccatggatgccgtcgtgatcgcctgttgcacagacggcatgatccagaaaatcagccggtacatgaagggcagagagctgaaatacgccagaggctacgagtactacgacgaggaaaccggcgagatcttcagccctggcgagatgtccagagatgagtgggacaaagaatttggcgtgcgcatccctctgccttggcctacctttaagaccgagctggaaatccggatgggcgaagaggaccctctgaacttcctgaacacccacaccgatgtgcggaccgagatcgattaccctgcctggatgtatggcagcgaggacggcaaagaaaagcccgtgatcagacagatcttcgtgtccagaatgcccaaccacaaagtcacaggcgccgctcacgccgataccatcagatctcccagacatttcgccgacgatggcatcgtgctgaccagaacagccctgaccgatctgaagctgaacaaggatggcgagatcgagggctactacaacaaagagagcgaccggctgctgtaccaggctctgaaacaccagcttgagctgtatggcggcgacgccaagaaggctttcgcccaggattttcacaagcccaaggccgatggatctgagggccctgtcgtcagaaaagtgcggattcagaaaaagctgtccatgggcgtgtccgtgaatggcggaaatggaatcgccgagaatgacggcatggtccgaatcgacgtgttctgcgagaacggcaagtactacttcgtgcccatctacacagccgacgtcgtgaagaagaaactgcccaacagagccgccacacacacaaagccttactctcagtggcggatcgtggacgacaaggacttcgtgttcagcctgtacagccgggacctgatccacgtgaagtccaagaaaggcatcaaagtgaacctggtggacaacagccagatcctgaagaatgagatctacgcctactacactgccgccgacatcagcacagcctctatcgttggcatcggccacgacagcggcttcaagtttagaggcctgggaatccagggactcgaggtgctcgagaagtgtcaagtggatgtgctgggccacatcagcgtggtcaaacaagagaagcggatgggcttcagcggatcc

SEQ ID NO: 264 - DNA, 3417 bp, synthetic construct
  misc_feature 1..3417: note = Synthetic sequence or unknown origin
  source 1..3417: mol_type = other DNA
ggtaccagcaagttctaccggatcggcctggatatcggcatcggctctgtgggatacgccgtgatcgagaacgatcccgtgaccgaggaaccctgcagaatcatgaagctcggcgtgcggacattcagccccaatgaagtggataagaccggcgagagcaccgccaagaatcggagagagaaccggggcatcagacggcggaagagaagaaaggccttcagattcgagcggacccggaacctgatcagcaagaccttcggcaagcagatcttcgacgagctgaatctgctgtgcctgggcgacaaagagaagggcattagccctgccgacgtgtacagactgagagccaaggctctggacgagaagctgtctgacgccgaactgtgcagagtgatcctgcatctgctgaagcggagaggcttcaagagcaacagaaagagccagagcagcaacaaggacgacggactgctgctgaaggccacaggcgagaatcggaagcggatggaagataacggctaccggacaatcggcgagatgctgtatctggaccccaagttcaagagagaggtggccggcaagacattctacgacatcagaaaccacggcggcgactacagcaactgcttcttcagagaggacctgagcaacgagctggacctgatcctgaaaacccagcgcgagctgggcaacgagaaagtgaccgaagagttcgagagcaagatcctggaaatcttcaacagccagcggaacttcgacgaaggccctggcaaagagagcccctacaaggccaatttcgaagtgggcaactgcacattcatccccaccgagaaaagagccccaaaggcctcctacaccttcgagctgttcaacgccctgtccaagatcaacaacctgaaagtgaacgacaccgtgctgagcgacgagcagagaaacgccatctacaacaagatcaaagagcagaaagaactgaagttcgaggacatccggaagatgttcaagttcagcggcagcgagatcttcaacctgtgcagctacaagctgaagaaagaggacaacgacctgcctcaggacgagtacatccagaaatgcgagaacaaggtgttcatcagcatgaagaacagctacgagatcaagaagaagctcaagctcgagtcctcctacgagagccgggatatcatcgacgaggtggccaacatcctgagctacagcaagagcgatagcaagatcgacaacgccattgccaactccgagatcctgaagaatctgaccgatgagcagaagcaggccatcaaagagatgaacttcgataagttcggcagcctgagctataaggccatgaagatgatcgagcccttcctgctgcaaggacagagatacgatgtggcctgccagagcaccggcttcaatcacagcagcttcgagcacgagaagatgaagtacctgaaggggaaagagatcgacgagcggctggccgacatcaccaacaacgtggtcaagcggagcgtgaaccagacactgcggatcgtgaatcagatcatcaagacatacggcagccccgagtttatcagcatcgagctggccagagagctgggaaagaaccaccaggaccgggacaagattaacaagcaaatcaaagaacggaccgaggccaacgacgacttcgccaacaagctgaccgagaagttccacatcgtgaagcccaccggccaggacattctgaagtacaagctgtacgaggaacagtgcggcaagtgcatgtacagcggacaccccatcgacgaaaccagactgttcgagcccaactacgtgcagatcgaccacatcctgcctatcagcaagtccctgaacgacagctacaacaacaaggtgctcgtgatcgccgaccagaaccagaacaagggcgacaagaccccttacgagttcttcggcagcgacgaggaacggtggaacaacttcgtggctagagtgatgctgctcaagaatagagagaagcagcggaacctgctgaaaaagaccatcaccgaggacgacagcaaagagtttatctcccgcaacctgaacgatacccggtacatgtctaagctgctgctgggcatcttcgaggactacctgcagatggcccctgtgaagcagaacggcaaggccaagagaaaagtggtgtacagcgtgaacggcgccatcaccagctacctgagaaagtgttggagactggccaagatccgcgacgacggcgatattcatcacgctgtggatgccagcctgatcgccatggtggatgacagcatcacccagaagatcacccggttcaacaagtttaaagagacattcgccttcagcgacggcaagttcatcaacaagaccaccggcgaagtgatgaccaaggacgagatgctcgagtacaagaccgaacaggtgcaagagttcggcaagaccctggccgagccttatcctaacttcgtgaatgagctgaagatccggtccaccgtgaagtacgatagcttcgagttcagcaacgaggaaaagcaagagctgctgaaactgggctacagcgacgaagagatggaaagcgccaagcctgtgttcgtgtcccggatgaagaccgtgaagaaaaccggggccatccaccaagagacaatgatgagcaccagagagtacgaagagacaggcaatctgatcaagaccgtgccaatcagcagcctgaagctgaagtctaagatcgagagcgtgaaactgaaggacgacaagtaccctgagtttagcatcgagaactactaccggcctgaggatgaccggctgctgtacctcaagctgaaagagattctgcacgacaaccccgacggcctgaaaaagggcaatgtgcacaagcccagaaaggacggctctgatggccctctcgttagaagcgtgaagcagtactacaaagccagcaagcccgtgatcaccaagaacggcggagccctgaatggcagcatgttcagagtggacgtgttcgagaaggacaagaaattctatctgtgccccgtgtacatgagtgacgtgtacgcccacaagctgcccaacaaagtgattgagatcggcaaggactggaccaccatcgacaagagcttcaacttcaagttctccctgtaccagaacgacctggtcaagatcaccagcaagaaggacatcgtcctcaagaaaaccttcgacaaccctaagagcaagaagcccgactccatcaacggcaaagaaatgctggtgtactacaacagcaccggaatcgccgtggccagcatcaagatccagagccacgacaactgttacaagcaagagtccctgggcgtgaaaaccctgctgaacatggaaaagtactacgtggacatcatgggcaacgtgtacaaggcccctgagaacgagaagcgcgagaagatcggatcc

SEQ ID NO: 265 - DNA, 3444 bp, synthetic construct
  misc_feature 1..3444: note = Synthetic sequence or unknown origin
  source 1..3444: mol_type = other DNA
ggtaccgacaagctgtaccggatcggctttgatatcggcgtgggctctgtgggctacgccgtgctggaaaatgatcccgtgacagaggaccccatcaagatcctgaagctcggcgtgcggacattcagccccaacgaagtgaaagatacaggcgccagcaccgccacagccagaagagagaaaagaggcgtcagaaggcgggccagacggaagaaactgcggatgcagaaactgaaggtgctgatctccagccagctgcagatcgacgtgaaccagatgcagaacaacctgatcaacaaggacgtgtacgagctgagagccaaggctctggacgagaagatcagcaacgacgagctggccaagatcatcctgaatatcgccaagtaccggggcttcaagagcaacagaaagagcagcaaggccagcggcgacgatggaaagctgctgaaggccatcgagaagaacaacaagttcatcaaggacaacggctaccggacctggggcgaagccgtgtacaaggacaagaacttcaagatcaccgtggccggcaacgacttctacaacgtgcggaatcacggcggcgactacaagaactgcgtgcagagaagcgacctggaagaggaactgcggctgattctgaagaagcagcaagagttcaacaacctcatcaccgacgacttcatcgagctgatcattctggtgttcagccggcagcggaacttcgatatcggccctggcaagcagagcccctacttcaaagagaatggcttcgccgacgacgtgggctactgcaccttttacgaggaagaacagagggcccctaaggccagcttcaccttcgagtacttcaacgccctgagcaagatcaacagcctgaagatcggcagcgagttcctgagcctggaacagaagcagaagctgtacgaagagtttaagatcaagaaagagctgagctttgcccagatccggaagatgttcaacttcgacgacgagaagtccttcaacctgtgccggtacaagaccctgtctaagaaagagagagagggcctgaatcaagaggaaatcgtgaacaagaacaaagagctgttcttcgacagcgagaagaaacagaaactggccagcatggaacacagctacgacatcaagaaggccctgggctacgagagcagctacgataacagagagctgatcgacgagatcgcctacatgctgtctgtgtacaagagcgaggaacggatcgacgcctacctgaagtccaacgacaagggcctgttcaccctgctgaacgaggaacaggtgtccaagatcaaagaactgaagttcgacaagttcgccagcctgtctctgaaggctatgaacgagatcatcccctacctgctggaaggcctgagatacgatctggcctgcgagaaggccggcttcaaccacagcagcttcaagttcgagaagctgaagtacctgaagggcgacaagatcaaggccgagttcaaggacctgaccagcaacgttgtgaagagagccgccaatcagaccctgagaatcctcaatgagatcatcaaagagtacggcagccctcagttcgtgtctatcgagctggctagagagctgtcccagctgcctagcgagagaagaaagtccagcgacctgatgatcgccaaccaggataagaacgagcagctgaaagagcggctgcggagcgagttcaatctgatcaaccccaccggcagagacatcctgacactgaagctgtatgaggaacagaacagcaagtccatgtacaccggcaccaagattgaggccgacagactgttcgagcccaactacgtgcagattgaccacatcatcccttacagccggtgcttcgacgatagctacaacaacaaggtgctcgtgatcgccgatgagaatcagaacaagggcgatagaaccccatacgagtactttggcaacgatgagcagcggtggaacgagttcattgtgcgggccaatctgctgcacaacgccaagaaaacccggaacctgctgaagaagaacttctcccaagaagagagcaacgagtttatcaaccgcaacctgaacgacacccagtacgtgtccaagttcctgctcaacctgttccagaaatacctgatgctgaccccgtccaagaagtttaaagagatcaagcagattaagtgcgtgtccggcagcgtgaccagctacctgagaaagtgctggggcatcaagaaaatcagagaggacggcgacatccaccactgcgtggacgctgccattatcgcctctgtgtctgagggcaccgtgcagaagatcaccacgttcaacaaattcaaagaaaagttctttttcgacaaaaaaaacgagcggttcatcagcaaaaagaccggcgaagtgatgaccgccgaggaaaaagagaactacgagaaagagggaatcgagctgctgcggggcacactgcctaaactgtacgatggcttcacccaagagctgaagatccggtccaaagtgaactacttcgacttcaatttcagcgacgaggacaaaaacgccctggtcaagctgggctacagccaagaggaagtggaaagcctgaagcctgtgttcatctcccggatgaagaacgtgaaaaccaccggcgccatccacaaggacaccatgatgagcaccagagagttcgacgagacaaagtgcctgatcaagaccgtgacactggacaacctcaagatcgagaacaaggtggaagaagaacccctcaaggacgacaagtaccccgagaagagaatcgccaactactacaaccccaagaccgaccggctgctgtacctgaaactgaaagaaatgctggtcgagaagggcaagatcctcgacaaggtgtacaagcccaccaagtctggacagcagggacctcttgtgcggaccgtgaagctctacgaaaagtctagcaaccccgtgatcaccaaacacggcgctggcgccaacgataagatgtacagagtggatgtgtatgagaaggccaacaagttttatctgtgccccgtgtacatgtccgacgtgtacaacaagacactgcccaacaaagtgatcattcgggacaagccctgggccgagatcgacgactcctaccagttcaagttcagcctgtaccagaacgacctcatcaaagtgacctccaacaaagaaatcgtcatgaagaaagacaagaaccaccagaacaagctgtccctgaagccagacgagatcaaaaacaacgagttcttcgtgtactacaacagcaccaacatctccaccgccagcatcgaagtgatcagctatgacaactgctactacaaagaaggcctcggcgtcaccacactgaagaatatcgagaagtactacgtggacatcatggggaagatctacaagagccccaaagaggaacgcaagaatttcaacggcctgtacggatcc

SEQ ID NO: 266 - DNA, 3468 bp, synthetic construct
  misc_feature 1..3468: note = Synthetic sequence or unknown origin
  source 1..3468: mol_type = other DNA
ggtaccaagtacagactgggcctcgatctgggagtgtctagcattggatctgccgtgctggccctggacgagcagaacaatgtgcaggatattgtggatgccggcgtgcggatctttgaagtgtctgatggcgccgaggaaagacgggccaagagaagcgccagaaagaacctgatccggaccaagaagagactggaactgctggcccagaagctgtacgagaatcagctgtgggtgtcccctaatcctgagggcaccgacaacctgaagtctaagagcccctacaagatcagattcgacgccctgaacgagaagctcgagaaccagaactacatcggcagagccatcctgcacctggccaaacatagaggcgccggatttgtgtccgccgctcaagagatggaagaggaagttctggacgccggcgagaagtccaagaagaagcagacagcttacgagctgctggcctctcacctgaaagagacaaacagccggaccatcggcgagttcttttggaagagaatcctcgagagctacgagaaggacgagaacggcgagcaccccaaagtgaagctgagaacagtgcggcagaaaagcggcatggtggactacgccctgcctagatacctggtcaaggacgagttcaagcagatctgggacaagcaggccgagtacttccctcagatgcagaaggccggactgaagcaagagatctacgacatcctgttctacgagcggcctgccgctccttatgccaccggcaagtgcatctacttccggaacgaggaccggctgctgaaggcccatcctctgtctgagctgcggagaatctacgaggaagtgaacaacatcagaatcctgagcgacaccaacaagcggcccctgacactggaagagagagacaagatcatcaacgaactgctgctgcagggcgagaatgccggcagcaagtctatcaagaagctgctgaaactgagcgcccagcagaagatcagcatcgacggcgacaaggacaagcccatcaaggcctacctgtacagcagacccgagttcgccgagatcgagtacatcaagaatctgtccgaggccgaatttgccgagttcatcgagtttctggccaatcctgtgtctcccgacgacaagaacggccggctgtacaacgaggatgagctgatcgcccagctgaaagtgatcctgaagatcgacgacgagaagaacatcagcgacctgctgatcaagctgcccaaaggcagaggcatgctgggcgtgtccgccacaaagatcatcctggaaaagctcaaagaaaacgtggtgtcccaccgcgagatcaccgataagctggccaaagaggaccccagattcatggccgaggaagagatcgccagacagaatcagggcaagtgcttcgagctgccctactacggcgagatcctgcagacagatacacagcctctgccacctctggtcatcaagaacaacaagagcctgaagccggaagagattaagtggggcaagatggctaaccccgccgtgcacatgattctgaaccagatcagactggtggtcaacgagatcgtccggatctacggcagaccctacgacattcacgtggaactgggcagagatgtgggcatgtccaccgacaagcagaagcagtttgagacagcccagaaggccaacgagaaactgaacgaagaggccaagaagtacctgcaagagcaccacatctacgtgaccggccagaacatcctgaagtacaaactggctaaagagcaaggctggaaggacgcctacaatcccacacaggccatcagccggaacttcatgggcttcgagattgagcacatcatccctcaggccagaggcggcaccgatacctacaacaacctgtgcctggtcaacagaagcgacaacgaggccaaaaaggacgacttcgcctacgactacttcgtcaagaccaagtctcccgaggtgctgagagagattctgaagaacgccagagccaacacacccaacaaggcttggagattcgaggccgacgccagagagcaatacgaggacgagggcgacaaagaagaaaccaccagacacatgaccgacaccagatacgtgtccaagctgaccgccagatacctgagagccatcgtggattgcagcgacgtgaacgaagtgtcccagaatagaatcctggccgtgaaaggcggccagacctctgaacttagatggcggtggaatctgcagggcctcgagtacgatctgatgggaatcaaggtgccccggttcctgtactggctgaacaacgatacaggcgaggtgtcctacgagagaaagaatgaggacggctggattcccgagaagaatcccgagtggtccgtgaagcccagaatcgatcacagacaccacgccatggatgccatcaccgtggcctgtacaactcgggccctcgtgaagaggctgagcaatgaagagaagctgcggtacatgcctacaccactgcctatgacaagcgtggcctccgtggccgattttcggagaagagtgctggaagtgctgcgggaagtgaagatctcccacaagcctgaccacaacaagctgggccagtttcacgaagagacaggcaaagtgaaactgtgcaagaaccccgacaatcccaacaatctgatcaccgtgtactcccgcaagatcttcaaggtggtcaagacctacaatgacctggacaaactgctgatccccgacagcgtgaaggactcttggtacgagggaatcgccgagaacagagccaaacaggccaagctggtggccgacttcaagcagtattggaacgtggccgagcagatccttcaagaagaaaacgagaaagacgtcgccgacggcaagaaagagagaaggatcaccgacggactgatcgccgccaagaccttccacatcctgctggataagaagctgtggaagggcgataagatcaagtgttacgagaacgtgtccagcttcgtgttcgtgaagaaacacaacctggtgtacaagagcggcaacaaccactgcgtggacttctatgagaaggatggcaaagtcggctgggaagtgatcaagagattcgatgtgaaccaggccgactttatccctcagtggaagaaggacggcggcaagctgatttggagcgtgcagcagagagacatgctggaactggacacacctgtggaatgggccagctacaccgacaaacccagatgcctggcaaaagtgaagaagttcagcgacggcagagtgaccatcgactacatgacagacgcccggatgacaagccccaaggataagtccctgaagtatatgttcgtgcacagcctggaagatcggggcctgagctacttcatcaaccacaagacccggaagatcgagctgacccctttcggcaaagtcaagaaaaagcacaaggtgctgtggaacggcaccaagacagctgctggatcc

SEQ ID NO: 267 - DNA, 3480 bp, synthetic construct
  misc_feature 1..3480: note = Synthetic sequence or unknown origin
  source 1..3480: mol_type = other DNA
ggtaccaactacatcctgggcctcgatgtcggcatcggatctatcggatgggccgtgatcaacctggacaagtacagagtggaagatatcggcgtgcggatcttcgagagcggcgagaatgccaagagcaagagcagctactgtcaagagcggcggatggccagaggcatcagaaggctgacaagacggcggagccaccggaaggatagactgaagtcccacctggaaatcatcggcctgaccaccaagaacgacatcaaagagtactacgagaacggcaactgcaacatcatcagcagcagagtgcgggccatcgacgagaagatttctccagaagaactggccgcctgcctgatccacatctgcaacaacagaggctacaacgacttctacagcctgaacgacgaggacgccaccaaagaggaaaagagcgagtacgaggccctgaacaagatcgagagcctgatgtgcagcaacaactaccggaccgtggccgagatgatcctgaaggacgataccttcaacggcgacggcaagtgccggaagtaccacaatagcgagttcagcgacgagatcaacctcatcaagcggaaccggctggaagaggaagtgaacctgatcctggaaaagcagcgcgagtactacacctgtctgaacgatgacgccatcaagaagatcaaggacatcatcttcagccagcgggacttcgaggatggccctggcgacaaggacgacaagttcagaaagtacaagggcttcctggacaccctgggcaagtgcagattctaccccgaagagaagcggggcgagagattcacagccattgccgatgtgtacgccctggtcaacgtgctgagccagtaccgctactacgacaagaacggcgagctgtgcttcaactccgatatcgccaaggctctggtgtcctacgctctggaaaacggcaacatgaccaagaaggacctcaagaccatcaccaagaagttcggcgtcatcttcgacgacagcggcaccgaggatacccctatcaccaagtgcttccggtacatcaagggcatcaagcccgtgttcgacgagttcggctgcgactggaatgagctgatctccgactacaccgacgtggaaaacaacctgctgaaccggatcggcgacaagctgagcaagtacatcacccctaagcggaggatcaagaagctcgaagagttcaacttcgacagcaagatgatcgagaagctgtccaagatgaagttctccggcaccagcaacgtgtcctacaagtacatgaaggacgctatcgaggccttcctcggcggcgacatctatggcaattaccaggccagcttcaacaaagagaacacctacaccatcaaagaagaggacaagccctacaagctgcctccattcaagtccgaggacgactgcgagttcttcaagaaccccgtggtgttcagagccatcaacgagacacggaagatcatcaacgccgtggtggataagtacggctacccctgcgccgtgaacatcgagacagccgacgaagtgaacaagagcttcgccgacagagacaagaccggccggatgaacaaggccaacgaggccgagaacgaccggatcagaaccgagatcagcaatctgctgaagattgacgagaacagcgtgcggcccgtgcagatcgaaagatacaagctgtgggaagtgcaagagcacaagtgcctgtacagcggcaaagagatcgctgaccccattcctatgctggaagataacgaccacctgtacgaggtcgaccacatcatccctttcagcatcatcctcgacaataccatcaacaacaaggccctcgtgtacgtgtccgagaaccagagaaagggccagagaacccctctgatgtacatgacacctgagcaggccgagggctacaagagcagagtgaacgccatgatgaagtccaagaagtgcagcaagaagaaataccagtacctgatgctcgagaacctcgacaacaacaacctcctgagcgagtggaagtcccggaacctgaacgatacccgctacatcagcaagtacctcgtgaactacatcagggacaacctgcggttcaaccccaacaacgagtttgccgacgacttctccatcaagaccagcaaccgggtgttcgccgtgaagtctaagttcaccagccagttccggaagcagtggctgaatagcaagacctggggccgcaaggacaaagaagaactcaagaaaatcacctacctggaccacgccgccgatgccatcgtgattgctaactgcagacccgagttcgtgatcattgccggggagaagctgaagctgtacaacatctggaagcaggccggcaagtgtatcaccgacgagtacaccagatctctgaacaactgcgtggacacactcgtgaagtactacggcatgaaccggaacttcgtgaccaagattctgaagaaccccagctacaaggtgtcccctatcatccctcatatcgccgacgaaaccgacaaccggctgagagacttcaacacccacagaatcctgttcaacgcccctgacgacaccaacgagcagatcaccgagacattcgtgtcccacaaccggcacctgtatgccgacgatcctgagttcgccgagtctctgaagatgcccgtgatctcctacaagcccgagaggaagtacaccggcgagatcaccaccgagaatcccatcagcgtgaaagagattgacggcgaagaggtgcagctgagccgcgtgaagatcacaaagatcaccccaaagcacctgtccagaatccggaccgacgacaccgatctgagatacagcctggaaagcgccctgaacggcaagggcgatacctacacaatcgagaagtatctgaaggacaacaagctggaatacttcaccacactgaaaggacggcggatcaacaaagtgaccgtgaagaatcccaatcctgatccgaagtacctgaagaaagagatcagcgagaacaattacacctatctggacaacaccagctactactgcctcgagatctacaagaccaaggacggcaacaacaatatgctgggaatcgccatgagcgacctggttaagaagaacaagaaactgtacctgaaaagctccttcaagtaccccaaggactacggcgagcacatcatgtacctgttcaagggcgactatctgcggatcaccgacaagaagggacagatcaagtttgagggctactacctgtcctccaacggcatcaaggataagagcatctacgtggtcaaggacaacttcgataagatctttaagaaggacgacgataacaagcagaaggccaggggcaagacaatcaatctggcccagagggataagtgcatcaagctgaacgtggacattctgggcaagatcagcggctacaacaatggcgagggcatctcttgtggcgagcccctgtctctgctgaaagagaacgacggatcc

SEQ ID NO: 268 - DNA, 3480 bp, synthetic construct
  misc_feature 1..3480: note = Synthetic sequence or unknown origin
  source 1..3480: mol_type = other DNA
ggtaccgaggaaatcaagcagctgagcaagaacgaagagatccccaagcctaccgacctgaactacagaatcggcctggacatcggaatcgcctctgttggatgggccgtgctggaaaacgacgacgatgacgagccctgcagaatcatcgacctgggcgtcagaatcttcaagaaggccgagcaggacaacggcgatcctctggctttgcctagaagagaggccagaagcgccagaagaaggctgagaaggcggagagacagagtgctgcggatcaagaagctgtttgaggccgagggcctgatcaacatcgacgagttcgaggccagatacgagaaggccggactgaccgacgtgtacagactgagatacgaaggcctggaccggaagctgtccaatgatgaactggcccaggtgctgctgcacattgccaagcacagaggctacaagagcaacagcaaggccgaggaaaccgccaatagcgaggacgaggccaaacagaaagaggccggcgaagtcaagaagtccatcagcgacaacaagaaactgatgatggaaaaaggctaccggaccgtgggcgagatgctgtacctggacgagaagttcaagatcgactgcaactggaacgccgagggctacgtgttctgccctagaaacaaggccggggagtacaaagtgatcatcctgcgggacatgctggtggaagaagtgaaggccatcttcgacgcccagcggaagtatggcaatatcgccgccaccgtggaactcgagaagaaatacctggatatcatgctgagccagcggagctacgatcagggacctgccgctcctagcagatacgccattgatggctacgagttcggcatgtgcaccttcgagagaaagaacggccacagaagggcccctaaggccgcctacacatctgaactgttcgtggccctgctgaacatcaaccacaccaagatcagagacaaggacggcaacctgcggaccttcagcgacgaggaacggaagaagctgatcaagctgctccacgtgcagcaagaagtcaagtacagctccgccagaaagctgctgggcctgcctgacgacgagacattctacaacctgacctacagcaagggcaagaacaagaactgcgaggacgccgtgttcatcaagatgaagaactaccacaagatccgcgtggccatgaacgaggaatgcaccgacaaactgctggacgacgagcgggccgataagtacgatacaatcgcctacttcctgaccaagtacaagaacgacgacagcaggctgaaagagctgagagccctcggaatcggcggcaatgaatgcgccaatctgctgaagctgagctttacaaaggcccagaacctgagcctggtggctatgaagaagatcatcccctttctgctggatggcaaggtgtacagcgaggcctgtaaactggccggctacggcgagtacgaagaggacaagaataccggcaagctgaagctcctgaagggcaaagaaatcaccgagtacgtgaacgagatcagcaaccctgtcgtgcggagagccgtgtctcagaccattaaggtgctgaacgccatcatcatcgagtacggaagccctcaggccgtgaacatcgagctgagcagacagatggccaagaacaaaaacgagcgggacaagatcgataacgacatgaagaagcggagcgccgagaacagcaagatcctgaatgagatcatggagtacaaggctaaccccaccggcaaggacgtcgtgaagtaccggctgtggaaagagcagaaagaagtctgcctgtacaccggcaaaaagatcagcgccgatgagctgtttgccggcgacggggagtatgacatcgaccacatcctgccttacagcaagaccttcgacgactcctaccacaacaaggtgctggtcaaggccgaagccaacagagagaaaggcaacagaaccccttacgagtacctgatcagcaaaggcggcgagaaagcctgggaagagttcagcgtcagagtggaacactgcatcaaggactacaagaagaagcagaaactgtccaagaagtgtatcaccgaggacgacaccaaagagttcaagcggagaaacctgcaggacacccagtacgccaccaccttcatctacaatctgatccggcagaacctgtacctgaagccttaccagaacctcaccaacaaaaaggtgcagcaggttgtggccctgaacggcagcatcacaagctacctgtctaagagatggggcctcgagagcaaggacagaaagatcgacacccatcacgcccaggatgccgtcgtgatcgcctgtacaacacagggcagaatcaacaagatctccaactacttcatgtgcagagaggccgagctgtccggcaaccacgtgatctctaggaagaagtacgacgagaactccggcgaggaatttcccaagccttggaagtactttaagaaagaactggacgtgcggatgagcagataccatggcgaagccggcgctatcgactacgtgaccacacctagagagtacctgctgctggacaaggatgtgcggaagcacatcggctaccccgactggatgtttgtgaagggcagacctggtagaagaggcgtgctggacggcatcttcgtgtccagaatgccctctcggaaagtgtctggcaaggcccacgaggataccatcagatccgccaagtactataaggacggcggctgtggcgtgaacaagggctatgtggtgttcaagaaaaccatccagggcatcaagctcgacgagaatgacgagatcaaggatttcttcaaccccgacagcgaccggctgctgtacaacgccctggtcaatagactgaagcagcacaacaacaaccccaaagaggccttcgccgagcctttctacaagcccaagtctgatggcacccctggacctatcgtgaagaaagtgaaagtgttcgagaagatgaccatcggcgtgtccctggaaaaagccgagggatacgccggcaatatcagcggcagcatgattagagtggacttctactacgtcaacggcaagtactacttcgtgcccgtgtacgtgtccgacgtggtcaatcaccagctgcctagaaagcgggccgtgaaagaaaaggtgtcctccgagtgggaagaagttgacgacaaggacttcatcttcagcatctacaagaatgacctggtgtacatcgagaacgacaagctgcccctgacacacaagaacaatagcgactaccctctgccagacgccaagaacggcgtgttcatgtacttttgcgacgccgacatcagcagcctggccatcagatgcgagagcaatgacggcagcttcggcttcagatccagcatcgtgaccgtgaaaaagttctgcaagtgccaggtggacgtgctgggcaacatcagcttcgtgcacaaagaaaagcggatgaccttcaacggatcc

SEQ ID NO: 269 - DNA, 3507 bp, synthetic construct
  misc_feature 1..3507: note = Synthetic sequence or unknown origin
  source 1..3507: mol_type = other DNA
ggtaccgaggaaatccggcagctgaaccggaagctggaagagacaaagcccatcgacctgaactaccggatcggcctggatatcggcatcacatctgttggctgggccgtgctggaaaacaagaacgacgagcccttccggatcatcgatctcggcgtgcggattttcaaagaggccgagcagtctaacggcgaccctctggctctgcctagaagaaaggccagaagcgccagaagaagaacccggcggagaagattccggctggaacggatcaagaagctgttccagaccgagggcctgatcgacatcaaagagttcgaggccagatacgagaaggccggactgcccgatgtgtacagactgagatacgaaggcctggacagaaagctgaccgacgatgagctggcccagatcctgctgcacattgccaagcacagaggcttcaagagcaacagcaaggccgaggaaaccgagaacgagaacgatgacaccaagaagaaagaggctggcgccatcaaggacagcatcagcaacaacaagaaaatcatggaagagaaaggctaccggaccgtgggcgagatgctgtacctggacgagaagttcaagatcgacagcaactgcaacaccatgggctacgtgttctgccccagaaacaagcagggcgactacaaagtgatcatgctgcgggacatgctggtggacgaggtgcacgccattttcgaggcccagagaaacctggacaataccagcgccagcgacgagctggaaaagaaatacctggacatcatgctgagccagcggagcttcgatcaaggacctggcgctcctagccagtacgccatcgacggcttcgatttcggcacatgcaccctggaaaaggccaacggcgagaagagagcccctaaggccgcttacaccagcgagctgtttatcgccctgcagaagatcaacaacacccggatcgtggacaaggacggcaacatcagaaacttcagcgacgaagagagatggaacatcatccggctgatccacaagcagcaagaagtgaagtacagcagcatccggaacgccctgtgcctgagcgacgacgagaaattctacaacctgacctactctaagaagaaggacagcgagcagagcgtgttcatcaagatggtcaactaccactccattcggaaggccctgaaggccgagtgttctggcgaactgctggacgataagcacgccgaactgtacgacaatatcgcctactacctgaccaagtacaagaatgacgactcccggctgaaagagctgaagaacctcggcatcggcgaggaaaagtgcaacaacctgatcaacctgagctgcaccaagacacagaacctgtccttcgtggccatgaagaagatcatcccatttctgctggaaggcaaggtgtacagcgaggcctgcaagatggccggctacaacaacagcaatgaggacagctgcgccgacagactgacactgctgaagggcgagaaaatcaaggacgccatcaacgagatcagcaaccctgtcgtgcggagagccgtgtctcagaccattaaggtgctgaacgccatcatcctggaatacggcagccctcaggccatcaacatcgagctgagccgcgagatggccaagaaccggatcgagcgggacaagatcgataaggacatcaagaatcggaacaacgagaaccagaagatcctggacgaaatccgcgagttcaagcccattcctagcggcaaggacatcgtgaagtaccggctgtggaaagagcagaaagagatctgcctgtacaccggcaagaagatctccgccgaggaactgtttgcctccgacggcggctacgacatcgatcacatcctgccttacagcaagaccttcgacgacagctaccggaacaaggtgctcgtcagaagcgaggccaacaagaacaagggcaacagaaccccttacgagtacctgatcagccaaggcggcgagaaagcctgggaagagttcaccatcagaatcgagcacaacatcaaggattacaagaagaggcagaagctgctgaagaagcacgtcaccgacgaggaaacaaacgagtttaagcggcggaacctgcaggacacccagtatgccaccaccttcatctacaatctgatccggcagaacctctacctgaagccttaccagaacctgaccgggaagaaaaaacagcaagtgatggccctgaatggcgccgtgacacactacctgtctaagagatggggcttcgagtccaaggacagacggatcgatacccatcacgcccaggatgccgtggttatcgcctgtacaacccagggcatgatcaacaccatctccaactacagcaagttccgggaactcgagctgaacaagattaacaagagccggtccatcaaggtggacgaactgagcgagaatgagttcatcaccagagagcagtacgacaagaacttcggcgtggaatttcccctgccttgggacaactttaaagaggaactggatatccggatgagcagataccacggcgctggcgacgaaaagttcctggaaacaagccccagagagtacatccagagccacagcgacgtgtccaagagactggactaccccaagtggatgttcgtgaagggcagacctggtagaagaggcgtgctggacggcatcttcgtgtccagaatgcccaaccacaaagtgaccggacaggcccacgaagaaaccatcagatccgccaagtactacaaggatggcggctgcggagtggataagggctacatcgtgtacaagacagccctgaccaatctgaagctggataagaacaatgagatcgccaactacttcaaccccgagagcgacaagctgctgtataacgccctggtcgagcagctgaaagaatatggcaacgactccaagaaggcctttgagaagaacttctacaagcccaaggccgacggctctaagggccctgtggttaagaaagtgaaggtgttcgagaagaaaaccaccggcgtgtacctgaagaaagtcaacggcttcggctacaatgactccatgatccgggccgacatctactacatcgacggaaagtactacttcgtgcccgtgtacgtgtccgataccgtgaagaacagcctgcctaatcagagagccgccaaggacaagaacagctgcgattgggaagtcgtgtccgacgacaacttcctgttcagcctgtataagaacgacctgctgttcatgaagaacaacaagctgcccctgaagtccatcgacgagtacaagtacctggtgcctgacagcagcaaaggggtgttcatgtacttttgtggcgccgatgtgtccggcctggccttcaagtgcgagagcaacgataagaccttcaacttcagaagcagcatcaccaccattgagcagctgtgcaagtgccaggtggacgtgctgggcaacatctccttcgtgaacaaagaaaagcggatgcccttcaacggatcc

SEQ ID NO: 270 - DNA, 3558 bp, synthetic construct
  misc_feature 1..3558: note = Synthetic sequence or unknown origin
  source 1..3558: mol_type = other DNA
ggtaccgccaactacagatggggcatcgatctgggcacaagctctatcggagtggccgtgtacgagacagacaacaacggcaagatcatcagcctgaagcacctggacagctacatcttcggagagcccgtggctcccaaagagatggtcacactgaacaccgccagaagaagcgccagactgattcggagacaggtggaaagaaaggccgccaggctgaagaagatgagctatatcgccaagagcctgggcgtgacccctgaggttttgagagccacacctgaagatgtggtggccctgagagccaaagccgtgcgggaagagattagcatcctgcagctgatcaaggtgctgagccacatcgtgaagaaccggggctacaagggcacactgtctgccgatgataagggcaccgtgggcaagaagctgagccagacagctcaagccctgacaggcggaaaaacactgggcgagctgctgtacgagagaaagacccaggctaacggccagccttggaggaaagtggaagaggacggcaccttcatctaccggcagctggtggaagatgagttcgccagaatctgggacacccaggccaagtttcaccccgagctgaatggctcttatgccgtgtggggcgacaagatgttccctgactttcccggcaagaccgagatctccctgaaggatgccttccacagcgccatgttctaccagcggcctatcaagtgggaactcgagacagtgggcaactgcgagatctacccagccgagaaaagagccgccgctgctcagatcgcctaccagcactatagaatggccaagacactggccgacctgagagtgcggaacaagaacaccagagaaagcgtgcccctgactctggcccagaagtcccagctgtttgagttcctggatgcccacacagccgagtacagccctgaaacaaaggccgtgcctttcaccgtgctgtataaggtgctgggcctgcctgagggctgcacctttacactggatagaacctatcacgccagaggcggcctgaagggcaataccacactgtacgcctttgagaaggccggcgtgctgaacgagtggtccaatctgacagacacagcccaagagctggtgctggaatttttcgccaacgtgtccaacctgagcgacatcgaggacaacagcgacgcctacatcaaagaacgggtgccagagctgaccaagaacctgaagcctacacctcaggattgcgaggcctgctgcagattcattctgctgctgaaggctagaggcgtgctgggagaactggttctggaacagggcagaagcagctactccatcaaggccctgaaaatgctgaccgagcggatcatgcagggcgagcaagaagccgatatcctggccgatatcgaggcccagaaaacacaccctcagggcaagttcagaagcaccgagacaatcctgaaagagcaggccatcaacgaccccgtggtcattaaggctctgaatgagttccacagagtggtgcagtacctgctgtaccggaactggaagcctaaagagatcatcatcgagctgagccgggacatgaagaagtccctgagcagacggcagtttctggaagcccagaacaaggtgcaggccgatgagagaaacgccgccaagaaagaactggtcgaggaatttggcgtgctgcccacacctaacaacatcgagcggtatctgctctggaaagaacaagccggcatgagcccctacagcgacaatggcagcaccaagattagcgacgccgaggccttcgacagcagagaaacacaggtggaccacatcatccctcagcagggcgaaatcggcggacccaataccttcggcaacaaagtgctggtgttcaccaaagagaaccacaagaagtccaatcagctgccctaccagtacgacaacgggaagttcaaagaggaaatcgacgcctataaggcctggctggtggacaacaacctgctgggaaagaagcggagcaaccggaagaaggtggaacctttctaccccgccagcaacctgatcaagttcgtggaacggctgcgcatcctcaaagaaaaagaatggaagtggtcccagcgggacaacgagttctggctgacccctaagggcagaaacattgaggacaagatcaacaacctcctcaagaccccagaggaactgaagcaggacttcgtggaccggcagaatcaagagacagcctggatcggaaaggtggtgctcggctggtgcaaggacatctgtttcgcccagcctacctttggcacactgaccgcttatctgcggagacagctgcagttcgaccggatcatcccacagatcagattcagcgagggcaagcccctgtacgacaccgacaagaagatgctggacagcaacaagctgaaagagatcctggaaaacgtcccctacgacaagctgagcgccatcaagcccgagttcgagaagtactgcgccgacttctttaagccctgcgacaccaccaaggactacgctaaggccctggccagattccagacagagatctacggcagcctggacaagagatgcgatcacagacatcatgccgtggatgccgccgtgatcggcctgtgttctgtgtctattgtgcagaaggctcagaacttctacaagaagcacaacaccctgtatatcaaggcctacgacgagcggggcaacagagataagaaacacgacgtggaaggctttctgctcgagaacgacacaatccccaatctggcccggatcagaaaagaagtgcaggcccggctgaccaactacgtcgtgtggcacaagcccgatcactttccctctggcgccctgtttgaccagaccgcctataacgtgctgcctaaggacggcgagaagagattcgtgaagagagcccctctgatcagcttcctgaagtccaacgagaagaaaaccctcgagaacctcgaaaagctgctgttctgcgacacagtgaagaacgagatcattacccagtttaaagagcggctggcccagggcatgacacaagaagaagccctctgcggcaagaaggacgatcctagcgacggcatcagctaccggggaaacaaagtgaagcaagtgaagtacatgtatctcaccggcagaggcatccgggtgttcgacgagaatgccgacaaagagatctccagcaaggataagatcggcacccagcacaagaaggcctaccagaacggcggctacgcctgcatggattttgatgccaagaccggcaagagactggccctggtgccactgtggaagtacggcaaacagaaacaggtgccacctaacgtcgtgcgggtgttcatcggcgacatcctgttcaacaagggcgtgaagcagtactttctggtcaagcagttcagcgccagagatggcctgggactgctgctcacaactgaagtgaacggcgctcggctgttcaccagcaatctgaagaactacagcgtggtgtctacccggcaggacattgccaagctgaaggacaatgagcacaccaccagcgacggatcc

SEQ ID NO: 271 - DNA, 4014 bp, synthetic construct
  misc_feature 1..4014: note = Synthetic sequence or unknown origin
  source 1..4014: mol_type = other DNA
ggtaccgacaagttctacctcggcatggacatcggcaccaatagcgtcggcatggcctgcaccgatgaagagtatagcctgctgagagccaacggcaaggattgctgggctgtgcggctgttcgatgagtctgagacagccgtgaagcggcggaactttagaacagccagacgccggattgtgcggcggagagagagaatcaaattcctgcagggcgtgttcgcccctttcatcgacgacgagacattcttcatccggctgaacgacagccagtactaccccgaggataagaacggcctgctgaacggcaacaagaacaacctgttcgccgacaagggctacaccgacaaggacttccacaaagagtaccccaccatcttccacctgagaaaggccctgatgacccagcctatcgaggacctgagactgtactacctggccatccaccacatcatcaagtaccggggccacttcctgttcgaaggcggaatggccgacatccgggacatcaccaagctgatcgagaacctgaatgccgtgtgcggcgacctgtttgacgaggacgcccctaacttcgacgtgaacaagagccacgaggccaaagagatcctgctgacctacggaaaggacaagcagaagcggctggaaagcctgttcggcgtgaccagcaacaccggaaaagagatcatcaagggcatctgcggctacaccatcaagcccgagaagctgttcgctggcaactaccaagaggaaaagagcttcagcttcaaggacctgaccgacgaaaccttcgaggccatgaggcctacctacagcgacgatttcagcctgctggaatccatccgggccatctacaacttcgtgaccttcgagaaactgctcgagggcaaagaggacatcagcagcgccatgatcgacctgtacgagaagcacaaggccgacctgaggctgctgaaggacttcgtgctgaacaacgccaccagagaagagtacaacagcctgttcaaagtgatcggcaaagagaacaactacgccaaatacgtgggcttcaccaagaaaggcggcgacaagaagaaggccacaccagctcagtacgacgagttcctgccttacctgaagaagttcatcaccagcctgacacaagtcaccgacgaggaaacaaaagagaagatcctggccgagatcgaggccaagaccttcctgccaaagatcctgcacgccgacaacggcctgtttcctcaccaagtgaacgaggacgagctgaacaagattctggccaacatggccaagattcaccccgagacagagtgcatcaaggacaagatcaagaaaatcttcctgtacagaatcccctacttcgtgggacccctggctggtgctaatggctgggccgttagaaaggccgagggcaagatcaccccttggaacttcgatgagatcatcgacaaggcccagagcaacgagaacttcatgcggcggatgaccaacatgtgcagctacctgtatggcgaggaagtgctgcccaaggccagcatcatctaccagaagtacaacgtcctgaaccagatcaacaagctgaagatcaacgataagcccatcaacgtggccctgaagcaggatatcttcaaccagctgttcctgaccaagaaaaaagtgaccgacaacgccatcaaggatctgctcgtgcggagaggcatcatcagcgaggaagagaagaaaaccatcatcatctccggcaaggacggccagctgaatgccaccatgtctagctacctgcagctgaaagacatcctgggcgacttcgtggacgaggacatccagaaagaggactccgtctgcgagaagatcatcctgtggcacaccctgaacaccgataagaacatcgtggtggacctgatcgagcggaacttcggcaagatccagatcattaaggacaacctcaagcagctgaagggcctcgtgttcaaggatttcggccggctgagcaagagattcctgaccgagatgaagggcgtcgacaagaccaccggcgagttcgtgtctatcctggacgtgctgtatgagacaaacgagaacctcaaccagattctgttcgacgagcggtacaatttcggcgacgtgatcaaagaagagaacggcgagaagcagagcgagattaagtacgaggatatcgagaagctctacgtgtcccctgccgtcagaagaggcatctggcagtctctgaagatggccgatgagtacatccaggccatcggcaagacccctgacaagatctttatcgaagtgacccgcgaggaaggcgtgaaaggcgacgctggaagaaagagcagccggcagaaacagctgctggaaaagtacaagaccatcgagaacatcgagctgctgacagagagcctgaccaacgagagcgatctgagactgcggcaagagcggctgtacctgtactacagacagctgggcagatgcatgtacagcggcgagcagattgacctggacagcctgaataccaaccagtacgatgtggaccacattctgccccggacctatatcaaggacgacagcctggacaacaaggtgctggtcaagaggtcctgcaacgccacaaagaccgacagataccccattcctaacgagatcctgggcaaagacgtgaagaagcactgggagctgctgcacaagaaggatctgatcagcgacaccacctacaagcggctgaccagaacaaagcccctggatgaggacgactacaacgacttcatcaaccggcaaaagaccatcaccgaccagacagccaaagccgtggctgaactgctggcccagaagtatcccgacaccaagatcgtgtacagcaaggccaagaacgtgtccgacttcaagagcaaggccggactggtcaagtgcagagagactaacgatctgcaccacgccaaggacgcctacctgaatatcgtcgtgggcaacgtgtacgacacctgtttcagcacccctatgagcatgttccggcaggatggcgataagtggcggacctacaacctgaaaaccctgttcttccggaacatcaacggcgcctggaccagcgacgacaacaagaccctcgtgaaagtgaaagagacattcaagaagcagcggagcattaacgtgacccggtacacctattgcggcaagggcgagttctacaaccagaccgtgtatccccacgatgacacaggcgtgaacgcccctagaaagagcggaagccctctgaaggattgcgctaagtacggcggctacaagtcccagaacaccgcctactttgccgtggtggaaagcgaaggcaagaagggcaaaatcatcaagacaatcgaggccgtgcctgtcctggtcacatacaatctgaagaacaatcccaacgccgtgcaagagtacttcgagagctacctgaccaatcctaagatcctcgtgccgaagctcaagattaagcaactgatcaagtacaatggcatgccctgctatatcgccggcaccaccggaatccagattatcctgcacaatggcgtgcagatgttcaccgatggcaagacagacgagtacatcaacgccctgctcaaggtggccgaaatggacaagaaccagacctgcgacaaggatgccgagacatacctgatcaagaccaaccggttcaaagaagtgaagctggaagtcaacaaacagaacaacattgccctgtacgatgagttcatcaacagactgtccagcggcctgtacggcaagatgggctctgccatctcctacctgacaaacctgcagagcggccgagagatcttcatcaatctgaccacactgaaccagtctctggccctgctgcagaccctgaagttcttcaagtgcaacgccgagatggctgacctgtctctgattggcggagcctctcacgccggaaagatctacatctccagagatatcaccaaggccgaagtggtgctggtgcatcagagcccttgtggcctgacactgagagagcagaagatcggatcc

SEQ ID NO: 272 - DNA, 3621 bp, synthetic construct
  misc_feature 1..3621: note = Synthetic sequence or unknown origin
  source 1..3621: mol_type = other DNA
ggtaccgagagaatcctgggcatcgacaccggcacaaatagcctcggatgggccatcgtggacaaagaggaaggcaagagcacactgatcgccaagggcaccaatatcttcaccgagggcgtgaagatcgagaagggcatcgaatcttctaaggccgccgagcggaccaagtacagaagcgtgcggaagcactactggcggcggaagatcagaaagatccggctgctgaccatcctgagcgagaaccatctgtgccctccactggacaagagcatcctgagacagtggcggctgaagaagctgtaccccgacaacgagctgttcatggaatggcagagaaccgaggacaaggcccaagtgaacccctacaagttccggtacatctgtctgacccagaaactggacatgagcgacatcgtgcagcggtacatgctgggcagagccctgtatcacctgaaccagagaagaggcttcctgagcaaccggaaagaggccacaagagagagcgaaggcgccctgaaagagggcatctctgccctgagcgaagagatgaaggaagccggctgcgagtacctgggcgagtacttttaccagctgtaccagaagggcgagaaaatccggaaccactacaccgccagaaaagagcactatctgaaagagtaccgggccatctgcgagaagcaaggactggaagccgctctggtcaagaagctggaacacgccatcttcgaccagcggcctctgaagtctcagaaaggccaagtgggcacctgtaccttcgagaaaggcaagtccagatgtcccagctctcaccctctgtacgaggacttccggatgtactccttcctgaacaacatcaaggtgcaagtcaacaccctgtacgagaactgcgagcggggcctgacaaacgaggaaaaggccagaatcatccctctgttcaagagaaagagcaagcggaccttcctgttcgaggatatcgccaagaaactggccggcaagaacaactactgctactacaagagcaacgaggataagccgtacaagttcaactaccagatggacaccctggtgtccggcagcattgtgaatgcccagctggaagagatcttcggcgaggattggctgacctgcgtgtgcgaagtgtacacccaggccaacaacaagacccggttccagatcatgaacgacatctggcacaccctgttcttctacgacgacgatgagaagctgaagtccttcgccgtgaacagactgcagctggacgatgagcaggccgacaagttctccaagatcagcatgcccaacgactacgccgctctgagcctgaaggccattcggaagatcctgccttacatgagagactacggcctgatctacagcgaggccgtgtttctggccaacctggtggaaatcatgagccggtacatttggagcgtgaaagagatgagagaggccgccatcgagaacgtgatcgaagtgatgcacagctacgacaagaacaatatcgacggcatgaccctggaacagtgcgtgaaagccttcctgcacgagcggtacaacgtgtccgatgtggacctgcggaagctgtatcatcccagcatgatggatctgtaccccaggcagaggcccagagaaaatggcgtctaccagctgggaagccccagaatcagcagcgtgaagaaccctatggccatgcggagcctgttccggctgagaaagatcgtgaacctgctgctgaaagagaggaagatcacccctgacaccaagatccacatcgagttcagcagggacctgaacgacgccaacagaagatgggctatccagacctggcagcgcgagaacgagaaggaccgcgagaagtgtcggaaagagatcgaaaagtatatcgctaaccccaccgacaccgacatcctgaagtatcagctgtgggaagaacagaaccacaagtgcctgtacaccggcgaggaaatcagactgaccgacttcctgggcaacaaccccagatacgacatcgagcacacaatccccagatctgccggcggagatagcaccaaggccaatctgaccctgtgcagctgccggtacaaccgggacgtgaaaaagaccaagctgcccacacagctgagcgagcacgacgagatcctggaaagaatcgccgactggaaagagagatacgaggacctggacagacagatccggaagatctccaccaagggcatcagcagcaaagaagagaaggataagatcatcaagcggcggcatctgctgagcctgcagagagactattggcggggcaagtaccagcggttcaccatgaaggaagtgcccgagggctttagcagacggcagggaacagacatcagcgtgatcagcagatacgccagaatgtacctgaagtccgtgttcaaacaggtgtacatcgtgaaaggcgtggccaccagcgacttcagaaaaatctggggcatccaagaagagtacaccaagaaagaacgcgtgaaccacgtgcaccactgcatcgacgccatcacaatcgcctgcatcgataagagcgagtacgacaagctggcccagttctaccaccagagcgacgagtacaagtttggcagaggcgagaagcctcagttcgagaagccatggcctagcttcgtgtccgacatcaagcagatccaggacgaactgctgatcgcccactacacaaaggacaacatgagcaagcaggccaagagatacgtgcgggactctcacggcgataaggttctgacacagggcgacgtggccagaagctctctgcacaacgagacttactacggcgccatcaatgtggacggcgtggtcaaatacgtcgtgcgcaagtctctggacggcctggatgagaaggacgtgaagaatatcgtggatggcgaagtgcgcgccaaggtcgagcatgccattagactgcacggaagcctgaagaaggccctggaaaacagcatctggatgaacgaagagaagcagattcccatcaagaaagtgcggatcttcacaggcagcgtgacccggcctatccacatcagacagcagagagatctgtccaagcacgactacaagcggcagtatcacgtgcagaacgaccggaactacatgatggctatctacgtcggccaggacaacaagggcaaagagaagcgcgagttcgagctggtcaacaatatcaccgccgccaacttctaccgcaagtccaacgacaaagtgcccaccaacaaccagctgctgcccatctacagcaagagcggctacgagctgaagtacagactgaagatcggcacaatggtgctgctgtatgagaacagccccgaggaagtgtgggaactcgaccggaagaacctgcagaaacggctgtacaaagtgaccggcatgagcagcatgatcatccagggcaagttcgagtacggcacaatcgagatggtgcatcaccagaacgccaagcctagcagcgagatcaagaagatcaacggggagtacaaatccgacgaggatttcagacccggcatcaagatgctgcacagccagattaaggtgctggtgcagggcgtcgacttcgagatcaatgatctgggcgagatcagcaggctgatcggatcc

SEQ ID NO: 273 - DNA, 3630 bp, synthetic construct
  misc_feature 1..3630: note = Synthetic sequence or unknown origin
  source 1..3630: mol_type = other DNA
ggtaccgagaagatcctgggcctcgatctgggcacaaattctatcggatgggccgtgatcgagcggaaggacgataatagctgcgccctgctggataagggcgtgcacatttttcaggacggcgtggcccacgataagtctggcgaaaaacctgccgtgcaagagagaacagccgccagagccagcagacggcactacttcagaagaaggctgcggaagatcgagctgctgaaggtgctgatcaagaacggcttctgccctgtgctgagcgacgaggacctgatgagatggaagtccgagaaggtgtaccctctggacgaagagttcatcaagtggcagcggaccgagacagagagcgacaagaacccctaccgggacagattcagagccgtgaccgagagactgaacctgagcgacaccagagacagatacgtgctgggcagagccctgtaccacctgaaccagagaagaggcttcctgagcaacagaaaggacgccgccgaggaccagaaagacggcacagtgaaagagagcatcaccaagctgaccgccgatatgtctgccgccggatgtagatacctgggcgagtacttctacaagctgttcaacgagaagaagaagatcaggacccactacaccgccagaaaagagcactaccgggaagagtttaacgccatctgcgagaagcagcagctggacgccgatctgaagaaagccctggaacgggccatcttctaccagcggcctctgaagtcccagaaaggcaatgtgggcaagtgcagcttcgagaagagaaagcccagatgtcccctgtctcaccccagatacgaggaatttcggatgctgcagtttatcaacagcgtgcggatcaagggccccgaggatgaagccttcagacccctgaatcacgacgaggccgaagccatcacacctctgttcttcagaaagagcaaggccgacttcgacttcgaggaaatcgccaagagactggccggcaagggcaactacggctacaaggatgatagagccgctcatccctacctgttcaactacaagatgaccgccagcgtgtccggctgtcctgtgacagcatctattattcaggccctcggcatggaacccaaccggaattgggctgaagatctgtgcgccctgtacaccaaaggcgagggcaaagaccaagagcagatcctgaacgacatctggcacgccctgtatagcttcgacgatgagaagaaactgaccgagtggctgcggatcagcctgcagcttggagatgacgaggccaagaacctggccaaggctagaatccctcagggctatgccagcctgagcctgaaggccatcaacaagatcctgccttggctgagaaagggcctgatctacagcgacgccgtgttctacgccaacctggattctgtgctgcctgcctctgtgacaggcgacgccacaaagctggacgaggtgtacgacaacatgagcgtgtgcctgcgggacttcgaccagaatcctctgaacagaaccagcaacaaggccgccgtgatctccgactatctgattacagtggccgaaggcgtgaaggtggacaagctgtatcacccctccatgatcgaggcttaccctgccgctcagagagacaaccacggcagaatcagactgggcagccccagactgaactccttcaagaaccctatggccatgcgggccctgttcagactgagagccctggtcaatgctctgctggatgagaaagtgatcgaccccgacaccaagatcaacatcgagttcgccagagagctgaacgactctaacacccggaaggccattgccgactggaacaaagaacaagaggacctgcggaagcagtacagagaggaaatccggaacctgttcagcggcaattacgagcccacagaggacgacctgctgaagtacagactgtacgaggaacagaagcacatctgtctgtacaccggcaagcagatcagccctaccatgttcctgggcaacgccaccgagttcgacatcgagcacaccgtgcctagaagcaaaggcggagatgacagcctggccaacaagaccctgtgcgacagcaagttcaaccgggaagtgaagaaaacaaagctgcccagcgagctgcccgagcacgagacaatcctgcagagaatcgaagagtggaagtccatcatcgaggatctggacaagaggctgagcgcccagcggagaaaatgtaaagccgccagcaccaaggatcagaaggacgctgccctgagaaccatccactacctgcggatgaagcggaactactggaagggcaaatacgaccgcttcgtgatgaaggatgtgcccgagggcttcagcaatagacagggcgttgacatcggcatcatcgggaagtacgcccggctgtacctgaaaaccgtgttccagaaaacctacgtggtcaagggcgccaccaccagcgatttcagaaaagcctggggcctgcagaacgagtacgccaagaaagaaagagtgaatcacgcccaccactgcatcgacgccatcacaatcgcctgtatcggaaagggcgagtatgagagatgggcccagtacatgagacagatggacagccacctgttctggaacgaccccaagcctagattcgagaagccctgggccacctttaccgaggatgttctggccgtgccttccagcctgatcgtgtctcactacacccctgacaacctgcctaagctgagcaagaaaaaagtgcgcatccggggcatcatccagaagaatcaagagggcaagctgatgtacacccagggcgatacagctagagccctgctgcacaaggataccttctacggcgccatccagagcaacggcgacatcagatatgtcgtgcgcaaggccatcgatgccctgaaggacagcgacatccagaatatcgtggatgaggccgtgcgcgagaaagtgcgagctgcagtgaaacagcacggcaacctgaaaaaggccgtggccgaaaccatctggatgaacgaggaaaagcagatccccatcaagaaagttcgggtgttcacccctaccatcacaaaccccattccactgaaggcccaccgggacctgtccgagaaagagtacaagcggcagtactacgtgtccaacgacagcaactactgcatggccctgtacggcgacgacaagcccagcttcaagctgtttagcatgctgtccgccgtgaaccacttcaacggcaagcctgaggaatggatcggcagcgaggataagcagggcagagcactgagatgcgtgctgaaacctggcacaatggtgctgttttacgagaacaccccagaggaactgcacgactgtagccagaccgagctgtccaagcggctgtacaaagtgaccggcctgtctcctatgaccatccggcagaagtaccacttcggccggatcaccctgaagcaccaccaagaggccaaaagagcctccgagctgacagagaagaacggcctgtggaaagaggtggaagcctacaggccagtgatcggcctgaacaacaaccaggccaagttcatcgtggaaggcaaggacttcaccctgaccgtgaccggcaggatcatcctgagaaagaagggatcc

SEQ ID NO: 274 - DNA, 3639 bp, synthetic construct
  misc_feature 1..3639: note = Synthetic sequence or unknown origin
  source 1..3639: mol_type = other DNA
ggtaccaagaagagaatcctgggcatcgacaccggcaccaattctcttggatgggccgtcgtggacaagaacgacaagggcgagtacagcctggtcaagaagggcagcctgatcttccaagagggcgtgaagatcgagaagggcatcgagagcagcaaggccagcgatagaacactgcacagagccctgcggaagcagtacttcagacggcggctgcggaagattgagatcctgaaggtgctgatcgacttccggtggtgtcctcctctgtcctctgatgccctgcacaagtggcacacccagaaaatctaccccatggacgacgccttcatcagctggcagaggaccaacgacaactacgaggaaaacccctactactaccggcacgtgtgcctgcacgagaagctggacctgaaggacaagtccagctgctacatcctggggagagccatgtatcatctggcccagagaagaggcttcctgagcaacagactggaccagggcaatgaggacgagtctggcaaagtgtccgagggcatctctagcctgagcaagagcatggaaaagaccggctgcatctacctgggcgatttcttctacaagatctacaaagagaaggggaacaccgagcggatcagaaaccggtacaccgacagagaggaacactacaagaaagagttctacgccatctgcgagaagcagaacctgagcgaggaacagatcagcagactggaaaaggccctgtacttccagcggcctctgaagtctcagcggaaaggcatcggcaagtgcaccttcgagcctagcaagtccagagtgtccgactctcaccccagcttcgagctgttcagaatgctgagcttcgtgaacaacatcaaagtgaagggccctcacgacatcgagtccagacaactgaccaccggcgagttcgagaagatcaagcccctgttcttcagaaagagcaagtcccagttcgacttcgaggatatcgccaagacaatcgccggcaagaacaactaccagtacatcaaagagagcgacgacaagagctacaagttcaactaccggatgacccagggcgtgtccggatgtcctacaatcgccaacctgaagtccatcttcggcgagaactacgcctatgccattgccgagcggtacatcctgtccgacggaaagtctcaagagcagatggtcaacgacgtgtggaacgtgctgttcagcttcagcgacaagaaaaaggtggaacagtggggcaaagagaaactgcagctgaccgacgaggaagccgagaagttcagcaagatccggctgacccacagctacacctctatcagcctggccgccatcagaaagatcctgccttggctggaacggggcctgatctattctcatgccgtgctgatggccaaggtgcccgatatcgtgggcaccgagacatggaagaagcggggcgaagagatcaccaaagaactgatgagcctgatcgccaacttcaaccccagagacatcagcatgcagggcaccctggactactgcatcaaggacatcctgaaagacatgtgcgagctgaagcccggcatggtggatctgctgtatcacccctccatgatcgacacataccccgacgccaagaagaacgcccagggcatctatcagctgggcagccctaagaccaatgccgtgcggaatcctatggccatgagaagcctgcaccagctgcggaaagtgatcaacgctctgctgctggaaggcaccatcaacaacgagacagaggtgcacatcgagtacgccagagagctgaacgacgccaacaaaagaaaggcactggcccagtggaacaaggacagagagacaatccggaagaagtactacgacgacatccggcggctgtacaaagaggaatgcggcaaggatatcgagcccaccgacgacgatatcaccaagttccagctgtggaccgagcagaagcgcatctgtctgtacaccggcaagtccatcggcatccaggacttcatcggccccaatcctagctgtgacatcgagcacacaatccccagaagcgtcggcggcgattctaccctggaaaacatgaccctgtgcttcagcttcttcaaccgggacatcaagaaggccaagctgcccacacagctgagcaactacgatgagatcatgattcggctcgaggactggcgcaagaccattgagaagctgcagaaagacgtggacagagtgaaaacccacagcggcatggataagaacaccaaggaccggctgatccagaagcggcacagactgaagattgaactgaagtattggcagggcaagtacaagcggttccagatggaagaggtgccagagggattcgccagaaggcaaggcgttggaatcggcctcgtgggcaaatatgccggcctgtacctgaaaagcctgttccacaaggccgacgaccggaccaagtctaatgtgcgggttgtgaagggcaccaccaccgccgagtatagaaagatgtggggcatccagaacgagtatgagaagaagtccagggacaaccacgtgcaccactgcatcgacgccatcacaatcgcctgtatcgagcctggcgagtataacgccaccgccaagtactaccagcagctcgaggaatacgagagagagaacgcccctaagcctacattccccaagccttggcctaccttcaccgaggacattaaggctatcgccgacgagatgctggtggtgcacagcacccctgacaatatgcctaagcacgcccggaaatacgtgctgaccagcaatggcaagaagctggccaaaggcgacgtggccagaggcagcctgcacaacgataagtattacggcgccattgagcacgacggcgagatcagatatgtgctgagaaagagcctgcaagagctgaaagagggcgacgtcgagaacatcgtggacgactctgtgcgcgagatcatcaagaaagctatcgctgagaagggcttcaaacgcgccatggaagaggacgttttcatgaacaaagaaaagggcatcaagattaagaaagtgcggtgcttcacccctaccgtgaccgatcctctgcacatcagaacccacagggacgtgtcccacaagtcctacaagcagcagttccacgtgaccctggacggcaattactgcatggccatctacgagggaatcttcaagggcaagaccaagcgcagctacgagatcattaacatgctggacgccgccagctactacaaagaaagcgccgacctgacaaagctgtaccctatcgctcctgaggaaaagagcggcctgaagtacagatgtctcgtgcggaccggcacacagatcatcctgctgcagaccgacgatgaggacatcaacctgatggacaaaaaagaactcaccaagcggatgtacttcgtggccgtgatgcaaaaggacggcagaatcgtgctgcggtacaatcaagaggccagagaggccaccatcctgaagaaagagagaaaggctggcgcctataagatcggcgagtcctacagaagcgagatctccctgagcctgagcgacttccatgcactggtggaaggcgccgacttcaagatcaatgtgctgggcgagattaccctgctgaagggatcc

SEQ ID NO: 275 - DNA, 3651 bp, synthetic construct
  misc_feature 1..3651: note = Synthetic sequence or unknown origin
  source 1..3651: mol_type = other DNA
ggtaccggaaagatcctgggcctcgatgtcggaatcggatctctcggatgggccgtgatcgacgaggatcagcacagaatcgtggacttcggcgtgcggatcttcgattctggcgaggaaggcgcctctaaagccgccgatagagcttcccaagtgcggcggagatacagaagcaccaagcggctgaacaagcggcggaagcagagaaagctgcggctgaagcagttcatcgaggaacagggcctgatcagcgtggaagatatcaacagcgcctaccggaccaacggcttcaaccctgatgtgtggaagctgagagccgaaggcctggaaagaaagctggaacctatcgagctggcctccgtgctgatcaacctgagcaactacagaggctaccaggacttctacgaggacgccgatgaggaagatagcggcaagctgagcgaggccaagaacaagatcaacaccatctacaaagagaagggcaagctgtacaagaccatcggcgagatgatctaccgggaagagtgcttcagatctggccccgatggcatgctgaccatccggaacaaggcccgcagagaaaacggcaagaaagtgaccgactacaagtacctgatcgaccggaagtacctgtccgaggaactgaaaaccctgctgaagtgccagagagagttcggctacgagcagctgaccgacgacgtgatcgatgccttcagcggcatcatcttcacccagagggatttcgaggacggccctggacctgataagaacaaggacaagatgcggcgggacgccatgatggccgctctgaagggcaatcagacctacagcggctttgacgaactcgtgggcaactgccctttctaccccgatgagaagagaggccacaagaacagccagctgtacgatatgtacgtgatcgtgaacagcctgagccagttcaccttcttcgacggcaagggcaacgagatcaactgcccagagtccatggtgctggaaatccggcagcagctgtttgagaaagccggcgtgctgaccaagaaggacatcgagacactgtgcaaggccaacggcgtgaccatcaagatccctaccgagctgggcaagaagaagaacctggtcaaggccgagttcatcaagtttctgagcaacagcgacatcttccccgtcgagtttatccagcggttcaaagaggaaaccttcgacgacgagaacgccctgagcgccaagatcggctacatcctggccaagttcgccacacctcggcggagaaaagaggaactgcagaaggtcctgacacaagaggaatacgagctgctgaaggacggcgataagatcaagaccgagaaaacaggcggcggagccagcgtgtcctttaagtacatgaaggaagccgtggaagcctacttcgagggcgtgaagtatggcgacttccaggctgagttcaacaagaagcaccctcaagaggaaaagcgagtctttctgagccccgagggcaaagtgctgcccatcaccgatagcgacatggttcgaaaccccgtggtgtacagaagcctgaacgagacacggaagatcgtgaatgtcgtgcgggccaagtacaaggacgtgaaaaccatcaacatcgaggtggccaaggatgtgggcaagagcttcgagcagcggaaagagacactgaagtaccagcgcgagaacgaggaaaacaacgagaagctgcggatgcagctgatcgagaaactggccgccgagaacatgcaagtgatgctggccgacaagctgattgagcggtttaccctgtggcaggcccagaaaggcaagtgcatgtacagcggcaaggacatcagcttcgccgagctggtgtctaccaccgtggtgcaggttgaccacatcatccctcagagcatcgtgctggacgaaaccctgaacaacaaggtgctggtgtacacagaggaaaaccagcggaagaaaaacaagctgcccctcgagtacatggccgaggaccaggccaccgagttcaagaacagagtgaacaacctgttccggaccggcaacatcagccggaccaagaaagagtacctgctgctgcccttcctggacgatgagacagtgcggggcttcgtggacagaaacatcaacgacacccggaccatcagcaagtttatcgccaactacctgcggatcgccttccaggacaaagtgaaggtccaagtgatcaagggcgccatcaccagcaagttcagaaagagatggctgggcagcaagaccaagagatacggctacgtgtccagcatctacggcctcgagaagaaaacccgggacctgcactactaccaccacgccattgatgccgccatcgtggccaacctgacacacccttatattgagctggcccaggactacgtgaagttcgatgccatgatgaaggatatcgactacctgcagaggaaaggcaacggcagcacagccctgaagctccaagaagaactgatccaagagcaggccaaaaccgtcgacaagatgttcaaggtgtacgggttcaaccgcgagtacaccaaagagctgctggcctctggctacgtgccatccatttgcgaggacctgcgcaaagaggtggaaatcagagtccctctggaaatcgagttcgacgccaaagaatacgccgacatggaaaaggccttctatgagctgagacagctgctcaacgccgtgcggtacaactttaaggacgtggactacgagaaccgcagcgacgtggtggacccagacatgctggaagagatcaatgccagactgcccatcgtgcggcctgatgtggcctgcatgaagtctaatgcccagctggtgttcgtggataagcccgtggatgagaatgccaccgccgaggaagtgtccaaagaactgaccagcttcgtgaagaagctcgaacagcggagcatcatggactacatcaagagcatcaggatgctcagcgaggaagagtacgccgagagagtgcacgagtactacagcgacaagcagttcgccgacgagatcgagctgccttacgtgtccttcaagatcgacagaaagttccggggcagcatggtggccagcgacaatcctgtttctctgggcaaagccggctacaagaccttcaaagaactcgaagaggacatgaagaacaacctcaagtgcccctactacgtgcggttcaacaaaggcatcggcgaaaccggcaactttaccatctacgacgcccggtcctactactgcatggaagtgtataccgacgagaagggctcctaccagatccggggcatcagatacgtggacgtgcggaatgatcacaagtctggcaagctggtgctgctgaaacctctgcctgaaggctgtacccaccacgtgtacctgttcaagaatgagtacatcaaggcctacaagaatggcaaactgcggaacaatggcttcggcgcttacagaggcgtggaaaacatcaatgagagcaccggcaagatccggctgttcagcaatgtgaacctgagcggccggaacaccaagatcagactggacggcgagatcaagaagatcgagatctctgccctgggacacatcatgggcgagcagaagtgtggcgaccagagcctgttcattgccgagaacgatctgaccggatcc

SEQ ID NO: 276 - DNA, 3789 bp, synthetic construct
  misc_feature 1..3789: note = Synthetic sequence or unknown origin
  source 1..3789: mol_type = other DNA
ggtaccaagagactgggcatcgacctgggcacaaattctctcggatgggccgtgttcgaggacgaggctatgagagaagcccctgtgggatctgaggcccctaatcctattgcttgcggcgtggtggtgttccccgaaggcctggaaagagacaagagcgacaatctgaagtcccctgccgccgagagaagggccaaaagagctgccagacggctgatcttccggcggagactgagaaagttccacatgctgagagccctgatggaactgggcatgtgccctctgagcgaggaaggcttcagagcttggaaagaggaaggcagataccctctgaaggacgccgccttcatggactggctgaagtctacccctgagcacaacccttacgccgatagagctgccgctgccgagggaaaagtggatgctcttacactgggcagagccctgtatcacctggtgcagagaagaggcttccggtccagccggaaagaaagagtgcaagagctgctggccgaggtggaagcttctgaggccaagggaaagaaggccgtcagaaagaccaaggccaacgatgagctgggcgtcgtgaagcaggccatcaaagatctgacagccgctctggaaggcgagaagctgacactgggccagtactttttcagaagattcgccgcctacgccaccgctctgaaagagggaagaatggccgaagccggcacactggcctgtatcagaggacagagaaccggcagagtggaacactacgagaaagagttcgaccggatcgccgaagtgcaaggactggcccctgaaaccagagacagactgcggagaatcctgttcttccagcggcctctgagaatccagaggcacctcgttggctggtgcaccctggaaaagggcagaccctatagaaccgtggacgccaagggcaacgtgatggaagccagaggccacaagtacagacggtgcctggaaggacaccccgactacgaaagattccgcgctctggccttcctgaacaacctgagagtgtctgtggccccagagcaagagggcgagtctgaaagactgagacacggcgagggcagaaccctgacagccaatgagagagaggcctttctgaccgcttgcgtgcggaaaacaagctggaaggtggaagatgccctggccaaggtgttcggcaagaaaacccacgtgcggagcaatcacagacctggcgacgaagcccctatgatgcctatgagagctgccctggaagccctggatattgcccctgaacagtgggagagagcactgaacgccctgtacgccttcgacgatgccgataagctgatcgcctgggctcagaaacctgtggccgaacatggactcggactggaaacagccaaggccagaagatttgcctgcatcgacgcccctcaagagagagccgcttactctctgcacgccatcagaaagatcctgcctttcctggaaaaaggcttcatgctgcggaaggccatcttctgcgccaagctgcctgatctggtgcctgattatgccgctcacgaggccgaactgcttgaaggcctgtctgcctgtgaagaggcctgggctgaagagagagtggttgctcaggccgatcctctgcacagaagaaagcccagacctctggaaagcggccactaccgggactacctgagagaaagatggggagtgaatgccgtggccttcgctcagctgtatgtggacacagcccagcctgacaaagaaaatcccgtgctgcctcctgtggacctgaacgccattcggaaccctctggtcaatagggccctgaccgttctgagaaggctggtcaacacactgagaagagagggcaccatcgacgctgacacccacatctttatcgagctggcccggaacgtgaacaacgccaatgcctgtagagccatcgagagatggcagaagcagcggcaagaggccagagagagagctagacagttcctgagagatcacggcgccaacgctaacgatgaggccctgatcctgaagcacatcctgtgggaagaacaagaacggaagtccgtgtacaccggccagcctattcctcaagaagccatcaccagcgccgattacgagatcgagcacacaatccccagaagcagaagcggcaccagcgagctgtggaatctgacactgtgcgagcggcactacaacgtggacatcaaaggcggcagactgcccatggaatgccccaatgctgaaagagaatggcgggaccctgctcaccctgatgctccatatcctgctctggctcagtctgctcctctggtggcctgggaagataagcggaaagagctggaaagcaagctgagcaagaaacccatgagaggcaacgacccagccgcctatgctaagagaaggcaagactggctgctgacaaagctggaacgggactactgggccaagaaggtgtccacctttcacatcaccgccgaggaagtggaagcccagggctttattcccagacagctggtggataccggcatcatgaccaaatacgccgtgcggttcctgaaaacccgctacgacaaagtgttcgccagaaatggcgccgctaccgccacagctagaaagctgtggggaatccagcaagagagcgaagagaagtcccgggccaatcacatccatcacgccgtggatgcttgtgtgatcgccgcactggatcagaccaccttcacagccctgtgtacccagctgaagcagggcgatacagtggatacctgggccagaacactgcctcctccaattccagacttcgcctctagagtgcaccaggccactgaggccatcctgattagacatctgcccgccaacagacaagtgcggcccatcggcaaaaagagcaccagactgcctgaggaagtgctgcaccggcttcagaaagaaggacggacagcccctagagccggcaagtctgatgctgttagaggcagcctgcacaacgacaccctgtacggcagaatcagagtggacggcgaagaaaagaccgtgctgaggaagggcctgaaagaaaccttcgagggcaagctgaagaaagaggctctgaccgccaaggatatcgctaacgctctgcaggacatggtggacaaaggcctgagagaggcactggccaagcagatcgctgcatatctgcaggccggactgagcgccaaagaactgcccgataagcccttcttcgcccctaacggactgccagtgaaaagcgtgcggatgctgtgctacaagcccaagaatcccgatcctatcagagtgccccatcctgagctgcctccaacatatggctctggcagtgatgccctgtacctgtccgtgcgcgagaatagcaagaccggcaaactggaaagctcctacgtgaccctgctgcagaccgtgaaagatcccgcttccgtggtgtttcagaacgagaagttccggatctacccctctcagctggccctggcctatgagcactctcccgaagaactgagaacactgacccctcagagactgagcaagcggctgtacgttgtgacccaggttgagtacacctttttcatctacctgaacttccaccaagaggcccggaagcagaaactgctcaaagaggaaagaaaactggccggcctgtccgagacaaccggcgagatcgattatatccacggcacccctagactgcacctgtctcagaaggcattcctggaacatctgctgttcgagaacgtgcacttcagactgaccctggatggccggctggaatggctgggatcc

SEQ ID NO: 277 - DNA, 3942 bp, synthetic construct
  misc_feature 1..3942: note = Synthetic sequence or unknown origin
  source 1..3942: mol_type = other DNA
ggtaccaaagagaacgaagagtacaacatcggcctggacatcggcacagcctctgttggatggtgcgtgaccgacctgaacaacaacgtgctgaagatcaagggcaagaacatgtggggcagcagaatcttcgaggaagcccagacagccgccgagcggagaaatttcagaagcgccagaagaaggctgacccggcggaaagagagaatcaacattctgcaggacctgatgcgcgaggacatcgagaaagagtacagcaacttcctgcctcggctgaaagagacaagcctgaagtacgaggacaagatcttctccaacagcaagtacaacctgttcagcgacaacaaccggcacgagatcagctactacgaagagttccccaccatctaccacctgaggaacaagctgatcaaagaggaaaacaaggtcgacatccggctggtgtacctggccatccaccacatcatcaagtaccggggcaatttcctgtacgacggcgacttcagcaacgacaccagcaaggtggacgacaacctggaaatcatcctcgagttcctcaaccagaactaccagatcgagctgaagtccaaggacgacctgaagaatatcctgctgagcaagaacctgagcaaggcccagaaaaaggacgagctgatggcctgcttcaacttcgtgtccagcgacaagaccatcatcaccaatatcatcaacgccatcctgggctacagcttcgagatcaacaagattttcgactgcgacctggaaaagagcaagatcaagttctccaacgagatcgacaacgaggaagagatcgagaacagcctggaaagcaacatcgacatctactacgccctgaaggacctgtacagctggtacatcctccaggacatcatgagcaactgcaactacatcagcgagagctttatgaagcgctacgagaagtttaaagaggacctgaagctgctgaagaagatctacaaagagtacttccccaaccagtacgacgagatgttcaaagtgaaggggaagaacaacttcgtcaattacatcggaaagaacaagggcgagaagttcggcaagtgcgaccccgaggacttcttcaagatgctcaagtccaagatcaaagaactgcccgatacctgcacgtacaaagagcagattgagctggacctgcagaacgacgacttcctgcggaagctgaacattatcgacaatggcgctatcccctaccagctgcacaagaacgagctgagcatcatcatcaaaaaccagagcaagtactacaacaccctgaaagaaaacggcgaaaagatcatcagcctgctcgagttcagaatcccctactatgtgggccctctggccaacgacaagttcaacaagtggaactgggtcgtgcggaacaacgagaacgagaagatcagaccctggaacttcagcgagatcatcaatgaagaggaaaccgccgagaaattcatcaaccggatgaccaacaagtgcacctacctgctgaacgagaaagtgatgcccaaagagagcctgctctacagcaagttctgcgtgctgaatgaactcaacaacatccgcatcaacgagaagcacatccccagggacctgaaaaagaaaatcgtggacaagctgttcaagcagaacaagaaagtcaccatcgatatgtttaaagaactgtgcaagatcgagggcctgcctgagtgcgatatcatcggcatccaggacggcaagaacttcatgtccaacatgagcagctacatggacatgtctaagatcttcggcaaagtggacgagaacaactacgacatgtgcgagacactgatctactggatcaccatctttgaggataagaagatcctgaagaaaaagattaaggccacctacagcaccatcaccgaggaacagctcaacaagctcctgaaactgaagtacagcggctggtcccggctgagcaaaaaactgctcgtgggcctgaagtctaacgactacgagacaatcatggataagctcgagaaaaccagcatgaactttatgcagatcattaacaacaagaactttggcttcgacaagaagatcaacgatctggcccctgtgatcgataagaacatcacctacaaggacgtgtccgagattcctacaagccccgccaacaagagaggcatctggcaggccatttgcgtggtcaaagaaatcaccaaagtgatgaacgccgagccgaagaacatcttcatcgagttcgcccgcagcgaagagtttaacaagaatatgagccagaagcgggccaagaagctcctcaagatctacgacaacatccaggatgagctggccacactgaaagaatacgacagcaacgtgtacgagaagctcaaagaaaacaagagcaacaaggacttctccgagcggatgcagctgtatttcatgcagctgggcaagtgcctgtactccggcgagcctctgaacatcgaggatctgaacctgtacgaggtggaccacatcctgcctcaggcctacatcaaggacgatagcatcgacaacaaggccctggtcaagcgcatcgagaaccagaccaagaaggacaacctgctgctgagcgacaaaattatcaacaatatgagcggctactggaagaagctgctcgacctgggcctgatcacaaaagagaagtacctgcggctgaccaagcggaagatctttgagaacgattacgagcaagagaacttcgtgaagcggcagctggtggaaacccggcagatcaccaaatacgtgaccaacctgctcaagaacagctacaccaacaccgatatcttcaccatccgggccgagctgacccacgcctttagagaagagttcggcatctacaagaaccggaacgtcaacaactaccatcacgcccacgacgcctacattatcagcatcatcggaaacgtgatgaacacctacatccggaacaatgaagagttcaaatacggggacttcgttaagaagtatcttaaagagaacaaaaacaaggccgaaaagaacggcatgatcatcggctctatcaagaagaacattgacatcgggaacatcaagaaggtgttctactacaaggattgcttcatctcccggatgctgatcgaaggcaccggcgccttttacgaccagacactgtacagccccaagattaacaagaacaagctcatcagcctcaaggacgacaaggacagcactaagtacggcggctacagcggcgagaagaaagcctacttcagcattctcgagtacatcaatgagaacggcctgaaagagtataagctgctgggcatccccatcaaggtggcctacgacatcaaggccaaaaagtactctgaggaagagtatattaagaaagtgtttttcaagaacaacgatatcaccgagctgaaagtgatcaagaaaaaggtcctcaagaaccagcagtacctggatgagaacaaagaagtgatgcggttctgcagcgactccgagatcagagtggacaaagagctggtcctgaactacaagatgaatgagctgatctacctgatgaacatgaaggaaaatcagctgaaggacaatgagaaggacctcctcaacaacaacttcgagtacatgttcgactacctgctcgagaagattaagaccgagtacaaggtgttcagcagcatctataagaaactgctggacaagaaagaacagtacatgctgctggaaaatgaggacaaaaaatgcgtgatcaacggcctggtggatctgatgaagaacggccagggcaatctgaagaaagtgggactgaccgagcgcgagggccgcaagagcaagcagaattttgacaccaagcgcctgaccaacatgattttcatcgacaagagcgtgacaggcatctacgagcggcggatcaacatctacggcatggaaaacagcagcagcaagggatcc

SEQ ID NO: 278 - DNA, 3954 bp, synthetic construct
  misc_feature 1..3954: note = Synthetic sequence or unknown origin
  source 1..3954: mol_type = other DNA
ggtaccgagacacagaacaagtacaacatcggcctggacatcggcgtgggctctgttggatggtgcgtgaccgatgagaacggcaagatgctgaagaagggcaacagaaacctgtggggcagcagaatcttcaacgaggccaatcctgctcagcagaccaggatctttagaggcgccagaagaaggctggaccggcggaaagagagaatccggtttctgcagagcatgctgcaagaggacatcgagaaagagtaccccaacttcttccccatgctgcgggaaagcagcctggacttcgaggacaagatgaccgccatgagcatcagcaacaagaagtacaacctgttcagcgacaccaccatgaccgacaccaagtactacaaagagttccccaccatctaccacctccggaagtacctggtggacaccgacgagaaggtggacatcagactggtgtacctggccatccaccacattctgaagtaccggggcaacttcctgtacgagggcgacttctccaacaacgcccaagagatcgaggaaaagctggacatcatctgcgactttctcgaggacagatacgagatcaccctgaactgcaacaagcaagagatcatcgacatcttccaagagaagaatatcgccaagaccgagaagaaagaaaagctgatgaagtgcttcaacttcgagaagtccgagaagcccatcatcgagaacatcatgaagtcctttctgggcctgcagttcgacctgaacaagatctttgagatcgagattgagaagtccaagatgagcttcgccaaagaactcgaggacgaggtggaaaccgagatcaagaagcagctgcaggacaacctgcctatctacgaggccatgaacgacatctacagctgggtcaccctgcaggatattctgaagggcaagcagtacatcagcgaggccttcatcgaaaagtataacaagtaccaagaggacctgaagctgctgaagcgggtgtacaaagaatacttccctaagcagtactccgagatgttccgcaagtacaatgagaagaacaagaccaactacgtggcctacaacaagaaaaacaacggaaagaccaacaaaaagtgcaagcccgaagagttcctcgccatcctgaagaagaagatcgacgagctgcccgacgcctgcgtggaaaaagagaagattaagaaagagattgaggacaacaacttcctccagaagctgaacgtcaccgagaacggcgccattcctcaccagctgcaccagaaagaactgaacgtgatcctggaacaccagagcaagtactataagaccatccaagaaaacaaagagaacatcgataagctgttctgcttcagaatcccctactacgtgggccctctggccaagaaagaaggcaagtggtcctggattgtgcggaaagaagagggcaatatcagaccctggaacttcggcaacatcgtggacgtggacaagaccgccgaggcctttatcaagcggatgaccaacaagtgcagctacctgcctcaagaggacgtgatcccaaagcagagcctgctgtacgccaagtactgcgtgctgaacgagctgaacaacatccgcgtgaacgagaagcacattgccaaggacatgaagcggaagatcattgagaagctgttccaagagcgcaagaaagtgacaaagaaggccctcaaggacttctacaagaaagagggcttcatggtggaacggatcgacggcctccaggacaacgagaatttcatgagcaacatggaaagctacatcgacatgaccaagattctgggcaccgtgtccgaggataactacgagatgtgcgagaaaatcatcgagtggatcaccatctttgaggataagaagatcctcaagaccaaagtgaaaaaagagtatcccgagctgaccaacgagcagatcaccaagctggccaagctgaactacaccggctggtctaagctgagcaagcacttcctgacaggcctgaaagcccaggacggcgagacaatcatggacaagctggaaaacaccacgatgaacctgatgcagatcatcaacagcgacaagttcaactacgctgagcagatcgagaaggctatccccaaaaagaccggcaagatcacctacgaggacgtggccgagattcctacaagccctgccaacaagagaggcatctggcagaccatctgcgtggtcaatgagctggtcaaagtgatgaagggcgagcccgagaatatctacatcgagttcgcccgcagcgaggatgtgaagaagcagagaaaggacagccggaaggaccagctgctcaaaaagtacaaagagatagaggcccaggccaccgagctgaaagaatacgaccccaaggtgtacaagcagctgaaggccgaccagaacgacaagaacctgacagagaagatgtacctgtactacatccagaacgggaagtgcctgtacagcagaaggcccctgaacctggacgagctggataagtatgaggtggaccacatcctgcctcagagctacatcaaggacgacggcattgagaacaaggccctggtcatcaaagagcagaaccagcggaagaaggactccctgctgctgtccgacaccatcattaacaaccagatcgagtggtggaaggacctgctcgataagggcctgatcggcaccggcaagtattaccggctgatccggcggaagatgctggaaacagactacgacaaagaaaagttcgtgcagcgccagctggtggaaacacggcagattaccaaatacgtgaccaacctgctgaagtccagctacgaggataccgagatctacgccatcagagccgaactgacccacaacttcagagaggactacaagatctataagaaccggaacgtgaacaactaccatcacgcccacgacgcctacatcctgagcaccatcggcaatattatcgccaaacactggaaagtgaaagagaacttccagtacggcgagtacgtgaagaaatacctgcaggacgagaagtctaagtacgagaagaacgggatgatcatgggcatgatccggaagaacgtggacatagccgaagtgaagaaagccatggagtacaaggattgctacatctcccggaagctggaagaaggcacaggccctttctacaagcagaccctgtactcccctaaagagaagcctgtcatcagcctgaagcagggaaaagcccctcagaagtacggcggctactctggcgagaacaaagcctacctgtgcatctacggctaccaggacaagaagggaaaccagcagtacaagctgatcggaatccccatccaggtgtcctaccagatcaaggccggcaaagaaaccctcgagaactacattatcgagacagagatgaaggacaaacagtactcccagctgaagattatcaaggataagatcctgatcaatcaagagtacctcgacgagaacaacgagcccatgagattctgcagcgacagcgagatccgcacgaacaaagaactgcaagtgaacaacaagatcacagagttcatctacctgatgaatctcgacaagaagaagctgagcgacgagcaaatcgagatcctcgaaaacggctacaccgacaccttcgagtatctgctggaaaaactgaagcaagagtacaagagccagcggaccgtgtatgagaaggtgctgaaaaagaaggacgagttcgagaagctcgagagcgacagcaagaaaatcgtgatcaacgaaaccatcaacctgatggaagaaggcatcggcaacttcaagaccatcgagctgtccaccatgctgggccgcaagaatggcaagagcttcgaaaccgacagcctgctgcagatgacctttatcgacaagagcatcaccggcatctacgagcggcggttcaagatcaactgggacggcgaacagctgggatcc

SEQ ID NO: 279 - DNA, 3960 bp, synthetic construct
  misc_feature 1..3960: note = Synthetic sequence or unknown origin
  source 1..3960: mol_type = other DNA
ggtaccaagagccagaaggactactacatcggcctggacgtgggcacagattctgttggatgggccgtgaccgacaccgactacaacatcctgaagttcaagggcaacgcccagtggggcatcagactgctggatgagtctaacaccgccgaggaaagacgggccttcagaagcagcagaagaagaacccagcggaacaagttccgggtgcagtgcctggaactgctgttcaacaaagagatcagcaagaaggacgtcgccttctaccagcggctgcacgactctaacctgtgggaagaagataagaacgtcgccggcaagtacagcctgttcaacgacgagggcttcaccgacaaggattactacaagctgtaccccaccatctaccacctgagaaagaaactggtggaatctcaggcccctgtggatatcaggctgctgtttctggccgtgtctcacatcgtgaagaaccggggccacttcctgttcgatagcgacagcctgggcaacaacagcgtgcccagcttcaacgaagtttggcgcgagctggctgtgtatatcgccgacgagttcaacgtggaactggaatgcaaggacatctgcgtgatcggcgacatcctcaagaacaagaacctgagcatcaccaccaagaaaaccatgctgctgaacgagttctccgtggccaagaaagaggaacccgccaacagcatcattaccctgcttgctggcggcaccgccaatagcgccgatctgtttagcaacgaggaactgaagaacagcgaggccagcaagatcaccttcagcagcggctacgacgagaaagtgaccgtgtacgagagcgtgttcggagatggcttcgagctgctggaaaagatgaaggccgtgtatgactgggccatcctggccgatatcctgaacaaccagaagtacatcagcttcgccaagtgcgagatctacgacaagcacaagaaagacctgaagatgctgaaagagtacgtcaacgcctacattcccgagaagtacaacctgatcttcaacgagaacaagagcggcaccttcaactacctggcctactccggctactccaagaaaaaccccgtggaaaagaagtgccagcagcaggacttcctggatttcctgaagaagcagctgcccaaggacgccaaaaacaagaaatacgagcagatgtacagcgagatcgccctgggcacctttatgcccaagatcatcagcaaggacaacgccgtgattcccatgcaagtgaacaaggccgagctgatggtcatcctggaaaacgccagcaactacttcccattcctgaacgagaaggacctggacggcaagagcgtgaaggacaagatcctggatgtgttcagcttcagaatcccctactacgtgggccctctgaacaagcactctgacaaggcctggctggaacggaccaacgagaagatctttccctggaacttcggcaacgtcgtgaacgtggacaagagcgccgagaagttcatcgagaacctgaccagcaagtgcacctacattctgaaagccgacgtgctgcctaagaacagcctgctgtactccaagttcgccgtgctgaatgagctgaacaatctgaagatcgacggggagaagatccccgtggacctgaagcagaagattttcatcgagctgttcgagaagaacaacagagtgacctccgccagactgaagaagtacctgaagtcctacggcgtggaaggcgagatcacaggcatcgacggcgacttcaagaactccctgaagtcttaccgcgacctgaagggctttgagctgaccgagagcgagaaagaagaagtcatcaaggccatcaccatcttcggcgacgacaagggcctgctgaagagaaggctgaataccctgttcggcgagaagctgagcaaagaggatatcgccaagatctccaagctgaagtatagcggctggggcagactgtccaaagagtttctgaacgaaattcagggcgcctgcgccgagacaggcgaagtgaactctgtgatcggcttcatgtgggagacaaacaacaacctcatgcagctgctgtccaacgagtacggctttattaaggccatcgacgaggccaacggcgagatgcagttcaccagcctgaagaaagagatcgaggccctgtacgtgtcccctaaagtgaagaggcctatctaccaggccatgaagatcgtggaagaactggtcaagatcaacggctgcaccccgaagaaaatctttgtcgaagtggccagaggcgccgaagagaagaaacacaccgtgtccagaaagaaccggctgctcgagctgtacaagagctgcaaaaaggacaatgaggaactgtacaacgccattgccgataccgacgaggatgagttcagacgggatgccctgtacctgtactacacccagttcggcaagtgcatgtacacaggcaagagcatccctctgagcgaaatctataacaagcacctgtacgacatcgaccacatctttccccagtccaaactgaaggacgactccctggacaaccgggtgctcgtgaccaagaagtctaacgaggacaaggggaacatctaccctatcgctcagtccatcagagaggaaagagccgccttctggaaaatgctgctggataagggcctgatcagcctcaagaaatatgagagactcgtgcggaacagccctctgaccgatgacgagctgaccagcttcatcaaccggcagctggtggaaaccagacagagcaccaaggccatttctcagctgctgagcaagagatacgagtccgagatcgtgtacgtgaaggccggactggtgtccgacttcagaaagaagtacgacttcatcaagtgccgcgagatcaacgatttccaccacgccaaggatgcctacctgaacatcgtcgtgggcaacgtgtacaacacccggttcaaccacaaccggctggcctttatcagcaagctgcagagcggagaggtgtccctgaacggcatgttcaactacgatacaaccggcgcctgggtcgcctttggcaccaacaagtctatcgacaccgtgaagaataccatgagcaagaacaatatccggttcacccgctacgccttcaagcagaaaggcggcctgtttaagcagaacattctcaagaaaggcaacggccaggtgccagtgaaggccaattctgccctgagcgacatcaacaaatacggcggctatgacaaagccatcagcacctgtttcagcctggtgtcctacgtgaacgataagggcgaaaaagtgaagcagttcgtgcccatcgacctgcacgaggaaaacaagtacctgcagaacacgaagaagtttatcgacgagaagctcagcgtggacagcaccatcatcatcccttgcatcaagtacaataccctgatctctatcgacggcttccggatgcacctgagcgccaaatctggcgacagccagattatctgcaagcccggaatgcagctcgtgctggacaacaccagcgagaactacatcaagaaaatcgtgaactacctcaacaagtgcgccgaactgaagtgcgaaaagaccatcaccgtgttcgacggcatctccttcgatctgaacatgcaggtctacgacgccctgtccgtgaaactgaacaacacagtgctgaacgtgaagttcgccaacaccgccaacgtgatcaagaaacggaaggacgtgttcaaagagctgagcctgagagaacagtgcgtggtcctgatgcagctcctgagcattctgcacagcaacgccagcctgggagatctgacactgatctgcgagagcaagcagtccggcagagtgtccatcaactctaagatcatccccaacaagaccgccaagtccatcaagatcattaaccagtctatcaccggcctcttcgagcaagaaatcgaactgctggacggatcc

SEQ ID NO: 280 - DNA, 3963 bp, synthetic construct
  misc_feature 1..3963: note = Synthetic sequence or unknown origin
  source 1..3963: mol_type = other DNA
ggtaccaagcagaatggcaatcacgccgccatcggcgactactacattggcctggatgtgggcacaacatctgtcggctgggccgtgaccgacaagcagtacaacatcagcaagttcaagggcaacgccatgtggggcgccagactgtttgatgaagctcagcctgccgccgctcggagatcttctagaacagctagaagaaggctggccagacggaagcagagactgctgctgctggaaatgctgttcgccgaggaactgaacaaggtggacgagagcttcctgatgcggatgagcgaatctgccctgtggcctgaggataagagcgacacctgtcctttcagcctgttcggcggcagagactacaccgacaaggactaccacagacagtaccccaccgtgtaccacctgagaaacgaactggtgcacagcgccgagctgcacgacatcagactggtgtatctggccctgcaccacatcatgaagtccagaggccacttcctgtacgccgactctaatgatggcgaggccatctctgtggaagccgctctgagcgagttctccgagttcgtgtttgccgagtacggcatcagcttcgagcccgctcacagagaggatttcattgcccagctgatctctggcgtgggcgtgacagccaagaagaagctgctgaaggccgctgccgatatcaaggccgatgatgaggccgagatcagcacaacagctctgctggatctgctggctggcgccacagtgaagctgagcgagctgtaccgggacgaagaactgaagtccgccgagattaagagcgtgtgcctgaagaacgacctggacgaggtgttcgatgagctgtctgagctgctgggcgacagagtggaactgatcccacaggccaagagactgttcgatacagccaggctgtcctccatgctgaacggccacaagtacatcagcgaggccaaggtggaactgtacgagcagaacaaggccgacctgaaactgctgaagtcctacgtgcggaaggctgcccctgagcagtataagcacatcttcagcgagaagtccgacaagctggccaactacgccgcctatacagacggcgagtgcaagcaagaggacttctgcaagttcctgaagtctgtgctgcccgagcctgacgatggcgatcctgaggtgcagagaatctacgccagaatcaaggacggcaccctgctgacaagactgaagggcagcgataacggcgtgatcccctaccagctgcacaagaacgagctgaccgagatcctgaagaatgccgagagatacctgcctttcctgaaagagacagacgaggccggactgagcgtgtccgataagatcatcaagaccttcgagttcaggctgccctactacgtgggccctctgaaccctgtgtctcctaatggatgggccgtgcggtttcctgagcacacaggcgagaaggtgtacccctggaacttcgagaaagtgatcgacacagaagccagcgctgccggcttcatcgagaatctgatcggcagatgtacctacaccggcgaaaaggtgctgcccaaggatagcctgctgtactctgagtacgccctgctgaacgagatgaacctgctgagaatcgacggcaagcccctgcctatcgaggactatagaaggctgctggacgaactgttctacaagagcaagaagaaagtcaccaagaagcgcatccggtcctacctgctggccgagggacttattgaagaggccgctgtgatcagcggcgtggacgacaatatcaagtccagcctgaaaagctaccacgacttcaagagcatcctggaaagaaccggcgacgccgacatggtggaagatatcatccgcagcatcctgatcttcggcgacgacaagaaaatgctgcggcggtggctgagcagaagcacccacgatctgaccgacgacgacatcaagtatatctgccggctgaagtacagcgactggggcagactgagcaaggtgttcctgacaggcatctacagccccgatgagtggggcgaagccaagtctatcatggactggctgagactgggcgagagaaacctgatgcagctgatgagcaacgatttcgagtttgctgcccacgctgctgagcacgccgcagaactgtttggcacagatagaaccctgggcgataagctggatgacctgtatatcgctcccagcgtgcggagatccatccggcagacactgaggatcgtggatgagatcgtggacatcaagaaaagcgtgcccgagaagattttcatcgaggtggccagagaaaacgccgacgaaatgaaccggaagcggaccgagagccggaaggaccagctgattacactgtacaagagctgcaaagaggactccggcgagctgttcgagagactggaaaacgaggacgagaacagcctgcggagcgacaaactgttcctgtactacacacagctggggagatgcatgtacagcggcgagcctatcgatttcggagccctgtctagaggcgagatgtacgacatcgaccacatcttcccacagagcaaagtgaaggacaacagcatcgacaaccgggtgctcgtgaagaacggctacaaccgggaaaagaccaacatctaccccatcaacgagagcatccggaccaagatgaggcccatgtgggaccacatgaagaagtacaagctcatctcccagaagaaatacgaccggctgatccgcagcttccctctgactgatgccgagctggaagcctttgtggccagacagctggtggaaaccagacagtctacaaaagccctggccggcctgctgaaagatatcctgggagagaaagtgcggatcgtgtacagcaaggccggcaacgtgtccgacttcagacacgacagcgacttcatcaagtgccgggaagtgaacgatctgcaccacgccaaggacgcctacctgaacatcgtcgtgggcaatgtgtacgacaccagattcaccaagcggttcttcgccaacatccggaacgagaactactccctgaacaaagtgttcgccttcgacaccaaagacgcctgggacacaaagaccagcatggccaccgtgaaaaagtacatggccaagaacaacgtgatcgtgaccagaatgccccgcgaagtgaagggacagctgtttgacctgcaactgatgcctgccggcaaaggccagctggaaaagaagtctggcctgccaatcgataagtacggcggctataacaagctgtccggcgcctacttctgcctggtggaacacaccgagaagaagaagagaatccggacactggaacccgtgtacgtgtacaagaagcagcagttcgaggccgatccagaggaatactgtagacagaccctgggcctgacagagcccaaagtgattgtgaacagaatcctgatcgacagcctgctcgagctgaatggccagaggctgtacgtgaacggcagaaccggggagagactgatcttcaagcactcttaccagctgacactgggctacgagtgggagaagtatatcaagcagctgcagaaatactccgagagatgctacgcccgcagaaccgagctgcctctgacagatcacgacggcatcacccgggacaagaatgaggaactgtatggcctgtttatcgagaagtgccggcagaaagtgtacgctgaactgttcggcaacatgcgggccgatatggaaaaacaccacgagaagttcagcgccatgtccgagctgggccaagtgaatctgctgctcgaggtgctgaaagccttccggtgtaatgcccagaaggccgacttcaccaatctgtgtggcaagggctccgtgggcatcctggttaagtctaaggccgtgtccaagctggacagcgcctacctcgtgaatagaagcgtgaccggcctgtacgagacaaaggtggacctgctgaagggatcc

SEQ ID NO: 281 - DNA, 4191 bp, synthetic construct
  misc_feature 1..4191: note = Synthetic sequence or unknown origin
  source 1..4191: mol_type = other DNA
ggtaccagcgacaagagcaagaagtactttatcggcctggacctgggcaccaatagcgtgggatatgccgtggtggacaaggactgcaaggttgtgcggaagtccggcaagagaatgtggggcagcgtgctgtttgatgaaggccaggccgctgccagcacaagagtgcaaagaagcagcagaagaagattcgagcggcggaaagagcggatcagactgctgcagagcctgaccgccaagtctgtgacagaggtggaccctagcttcttcgcccggctggaaagaagctttctgctgaacgccgagaaggacaacgagttcggccgggacaacatcttcaacctgttcgacggcgagtacaccgaccggaactactacgccgactacaagaccatctaccacctgagaaagcggctgtgcgaggataagagccaggccgacatcagactggtgtatctggccctgcaccacatgatcaagtaccggggcaacttcctgcacgacgaggaaagactgcaggccggatctgaggatctggccaagagcatcgaagagttcttcgaggcctactacgacaagttccccgacgaggatgaggaaaccggcgagatcatcggccatgccgatattccagccgaggaactggccgatatcctgaagtctaagggcaagaagtccgagaagaaggacgacatcatcaagaagatctgcgccaacgacaacagcctgaagaagaaggccagcgcctttgcctctctgctgctgggctataaggccaacctggccgatctgtttacaatcggctctggcgacgaggacaaggccaaggacgtgaagatcagcttcgatggcgccgattacgacgagaaggccgagagctttcctgagctgtttggagatgacggcgccgagctgatcggcgtgctgaagaaaatctacagcgatctgaccctgagcgccatcatcggcgagggaaagaaatacgtgtacgagggcatgatcgagcgctacgagaagaacaagaaagacctgctgatgctcaagacagtgctgaaggccgacgagaggatctacaatgagttcttcaaagagagcaacgagaaaaaggtttccttcgtgtcctacttcaagccccacgtgcggggcaagcagaatgagatcggaaagagagccagcaaggacgacttctacaaggccgtgaaaaacctgctgggcagcgataagttccctgacagcgaggccaagtcctacgtgctgagcagaatcgaagaggacgatttcctgatcaagctgaactctacccggaacgccgtgattccctaccagctgaacctgaacgagatggaaatcatcctggacaaccagggcgtgtactaccccgagctggccgagaacagagacaagatcatcagcctgctgaccttcagacggccttacagcgtgggagtgatcaagcctgagagcagattcgcctgggtcgagaaagccgacgtgaaggatgagcgggcttacccctggaacttcgaggaagtggtggactacgatagcgccagcgagaagtttatcaagaacctgaccggccgctgcacctactttaaggacgaatacgtgctgcccgccaacagcgtgatctaccaggcctacaacgtgctgaatgagctggccaacgtgcggatcatcctgagcgaaggcggagagagaaggctgacagttggcgagaagcagcggtgcttcaagctgttcctggataacagcaccgtcaagaccaaggacatcaccagcgagctgttcaaggccttcagagtggatagcaagggcctgacaggtcttggaggcgacggcaagaaattcctgagcaagatgaccggctaccgggccatcaagacagccctgaagatcgactgcttcgtggaagagaacggcaagatccagaccaactatgagctgttcgagctgtatgagaagatcgccgagatcctgaccgtgttcaacgactgcaagatcaagcggagagccctggaaaagctgttcggagagaagttccccaaggccgccatcgatctgctggtcaagcagaactttgtcggctggggcagactgagccacaagtgcttgtgtaaagccgagggcgccaacggcctgaacgtgctggaaaccatgtactccaccgacaagaacttcatgagcgtgatcagcgacgagacactgggctttaaagagatcttcgaccagaaaaccgacgagaacagcggcgagattaagtacagccagatcaacgagctgtacatcagccccagcgtgaagagaacagtgtggcaggctgtgaaggtggtcaaagaagttgtgaaggccgtcggctgcgagccttgtggcatctacgtggaaagcacccggcaggacgacaagaaaaaagtgaccaagaccagggccgagaagctgaaagaactgtacgagaaagtgcggaaggacaccgacgagtacaacaagggcttttacgagaagtccgtgggcgacaacctgaaaaccatgagcgacgacaagctgaatgacgacatggtgtacctgtacatgctgcagatgggcaagtccatgtacagcggcaagagcctggatctgaagaacctgtccacaacctgcgagatcgaccacatcgtgccccggcactacatcaaggacgatagcttcgagaatcgcgtgctggtgctgaagcaagaaaatcaagagaagtctggcacgctggccctgaaaaagtccgtgcgggatgagatgacccctttctggatgttcctgaaaagcaagggcttcatcggcaagaagaagttcggcaacctgaccaagagcgagtataccgagaaagacatgacaggcttcatcaaccggcagctggtggaaacaaaccagagcatgaaggctgtgcgggacctgctcaagagcagatactctagcagcgacgtcgagttcatcaaggccggcatcagctccgcctttagaagcgcccacacacagaagggctacgttgagttctttaagctgcgcgagctgaacgacttccaccacgccaaagatgcctatctggccgccgtgatcggctacttcacccggaagatctatcccatctggggcgccaatgaccagtccagaatcctgagagatgagatcgagagcagcgccggcagagacatctccgagctgagagagaaaagatacggcatcgtggtcgactccatgatctacgccacacctgacagggacgacgacgtgatctggaatacctgctacaacaatatcctgtccgccttcctgaacaacgattgcctggtcacccgcaagaaagaggaagccagcgctcagttttacaaggccaccatctacagactgcgggccgaaaagggcgtgaacctgagatacgctgtgaccagaagcggggagaagaagcccctgcctctgaactacggcaactacgatggcgagagcgacgcctatttcgtgctggctacagtgcagaagggcaaaaagaccgaaaccgtgctgacaggcgtgccagtgcggattgcctacctggccaaaaagaacgagacagccgtggatgactacctcaagagctactttgaggccaacaagaaggtgtacgtcagccacgataagcggcggattctgaagtaccagctcatccggtacaacggccagctgtgttatatcaccgccgccaccgaagtgatcaacgccgagcagctgatcatggacaagcggtactccctgctgctgtactgtatcgcccatcctaacaaaaaagtcaccgtgaaggacaatgtgtaccggctgaccgccgtggaaaatggcgagtacttcaccaacctgatgaaggaatttgtcaaggcctacgccgaaaagctcaacgagagataccctctgtacgccaaatacgccgatggcgctgtggcctatgtggaatccgagaagttcgccacactgcccctgtacgctgagaaagaggcctgcaaagccgcctacatcctgaacctgctgaatctgacaaaggccggctctacccagctggacatgaggaagtacgacggcagcacatcttggggtagactcggcggcaagacaatcagaaaggacgaggtggactggatcgacaccagcatcaccggcatctacaggaccgagatcaagggcgaacagggatcc

SEQ ID NO: 282 - DNA, 3972 bp, synthetic construct
  misc_feature 1..3972: note = Synthetic sequence or unknown origin
  source 1..3972: mol_type = other DNA
ggtaccaagaacaacggcaacaacctgaaaaccggcgactactacatcggcctggacatcggcacaaattctgtcggctgggccgtgaccgacgaagagtacaacgtgcagagattcaagggcaacagcatgtggggcgtcagactgtttgaagaagcctctggcgccgctgagagaagatctagtagagccgctagaagaaggctggccagacggaagcagcggatgctgatcctggaactgctgttcagcgaagagatcgccaaggtggaccccaacttcttcgtgcggctgagagagagcttcctgaaaacagacgacagaagcaccgacgccagatacagcctgttcaacgacaagaactacaccgacaaggactacctgaagcagttccccaccatctaccacctgagaagcgagctgatccacagcaaagagaagcacgacatccggctggtgtacctggctctgcaccacatcatgaagaagcggggccacttcctgtacgaggccgatggcaatgtgaccgagaagtccctggtcgagtacatcgacgagctgaactacttcctgagcagcgagtacggctacgagctggacttcgaggacaaagagaaatacgccctggtcctggaaaagaacgacatcaacgtgacccagaagaagaagctgctgcgggaaaagctgggagcccagcaagaacagcaagagtataaccctctggtgctgagcgatctgctggctggcgccacagtgaagttcagcgatctgttctgcgacgatgagctgaagaacaccgaagtgaagtccatcagcctgaagaacgatatcgacgccgtgttcgagagcctgacagccgccattggagagcggatcgagctgattctgaactgcaagatcgtgttcgacgccgccagactgtctcagatcctcggcggcaatacctacatcagcgacgccaagatccagctctacaacaagaacaagaacgacctggccaagctgaaagagtacatcaagaccaactatccccagaagtacaaagaggttttcaccaccaagaaggacaagctgaacaactacgtggcctactctaagaacaagctgcggagcggcgattactgctgcagccaagagtccttctgcaagtacctgatctctcagttccccgagatgaagaatacccagggctacgagaacatgtgcttcgagatcgagaacagcacctttctgagccctctgaccggcaccagcaatagcgttatccctcaccagctgaacctgagcgagctggaaaaaattctggaaaacgccagcagctacctgtccttcctgaacaccaaggacgaggatggcctgagcgtggccgataagatcatctctaccttcaagttcaggattccctactacgtgggccctctgagcgagaagtctcccaatcactggatcgtgcggagcaaagaaaagatctacccctggaacttccacaagaccgtggacaccaagcggagcgccgagaacttcatcatcaacctgatcggcagatgcacctacaccggcgagtacgtgctgcctaaggatagcctgctgtactccgagtactgcctgcggaacgagatcaacctgctgcggatcaacggcaaagaactgcccagaaccgtgatggacgagctgtacgagacactgttcgtgtccagcaacaagaaagtgaccaagaaaacgatcaaggacttcctgctgatcaagggctacatcatcaataccgacgaactgagcggcatcgacgacaccatcaagacaaagctgaagtcctaccacgacctcaagaacatcctgctcaagaccagcaatcccgagctggtggaagagatcatccagagaatcctggtgttcggcgacgacaagagaatgctgaggcagtggctggtcgagaactgccggatgctggacaaaaaggacatcgactacgtgtgccggctgaagtacaaggactggggcagattcagcaagcggttcctgaccgagatctaccacaccgataagagcggcaaggccttcagcatcatggacatgctgaggaccaacaacatgaacctcatgcagctgctgtctagcgactacaactttctggaagaggccgagaaagtgcggaaagagaacagctcccaggactacagcctgcagaaacggatcgacgagatgtacctgtctcctgccgtgcggagatctgtcagacaggccctgaagatcgtggacgagattgtggacatcaagaagtgcgccccgaagaaaatcttcatcgaggtggccagaggcagccgcgaggaaatgaagaacaaacggaccacctctcggaaaaacaagctgattgagctgtaccaggcctgcaaagaggacagcaaccctctgttcgagcagctgtgcaacgaggaagagaaccggctgagatccgacaagctgtacctgtactacacacagctgggcaagtgcatgtacagcggcgagatcatcgatttcagcagcctggccaccgagaactctaagtacgacatcgaccacatcttccccagatccagagtgaaggacgactccctggacaacagagtgctggtcaaggccgagctgaatcgggaaaagaccaacacataccccgtggacaacatcatccgcgagcggatgcacagcttttggaagatgctgaaagaaaagggcttcatctccgacaagaagttcaccaagctgcagcggcagacccctctgacagacaaagagctgagcgagttcgtcgcccggcagatcgttgagacacagcagtctacaaaggccgtggcctctctgatgaaggacatgtacaaggatacccggatcgtgtacagcaaggccggcaacgtgtccgacttccggcataagtacgagttcatcaagtgccgggacatcaacaatctgcaccatgccaaggacgcctacctgaacatcgtcgtgggcaatgtgtacgacaccaagttcaccgacaatttcttcaagaatatctccggcgagaactactccctcaacaaggtgttcgagttcgacaccccttctgcctgggatgccggcggatctagcattaagaccgtgaagcactacatggggaagaacaacatcctggtcacccggatggccagagaaggcagaggcaagctgtatgacctgacagtgctgcctgccggcaagggccagcacagcatcaacgagaacctggaaatcgagaagtacggcggctacaacaacgtgtacggcgcctactttatcgtggtggaacacacctccaagaagaagagaatccggaccatcgagagcgtgctgctgtgcgataagcccctgtatgagaagaaccccacagagtactgcgtgaagaaactggccctcgaggaccccgagatcattgtgcccatcatcagaatggacagcctgctggaaatcaacggctccagacgcgtgatcaccggcaggtctaatgtgcagctgatctacaagcacacctatgagctggccatcgataccatccacgagcagtacattaagaacatcagcaaatacgtggaccggtgcagcggactgaagaaagagctggacatcaccgagtttgacaagatcagcgccgaggaaaacatggaactgtacagctggttcatcaaaaagctcggcgccaatgtgtatcggcccctgttctccaacgtgctgaactatctgaacaagtgcgggaacgtgttcgaatccctgaacatgctggaacagtgcaaggtgctgctcgagatcctcaagacctttaagtgcgacagacaggtgtccaacctgtccagcctgtgtggcaagagcagcgtgggaaccatcctgaccagcaaaaacctgagcaacatggacagcgcctacctcatcaatcagagccccaccggcctgtacgaagtgaaagtgaacctgctgaagggatcc

SEQ ID NO: 283 - DNA, 3981 bp, synthetic construct
  misc_feature 1..3981: note = Synthetic sequence or unknown origin
  source 1..3981: mol_type = other DNA
ggtaccaagaaagagtactacctgggcctcgacatcggctctgaatctgttggatgggccgtgaccgacaccgactacaagatccccaagttcaacggcaacgccatgtggggcatcagactgttcaatgagagcgagagcgccgagcagagaagaggctttagaagcgccagacggcggtacaaccgggccaaagaaagaatcacagccctggaaatgctgttcgacgaggaaatcagcaagctggacgtggcattcttccagcggttcaaagagagcaatctgtaccccgaggacaagaccgacggcatccctttctgcgtgttcaacgacaagggctacaccgacagcgacttccacagagactaccccaccgtgtaccacctgagaaacgagctgatctccaaccagaacgccccttacgacgccagactggtgtatatcgccctgcaccacatcatcaagcaccggggccactttctgttcgacatcaactgcgacgactacaaccccgacgacttcgagaacatctacgaggacttcagcagcttcctgagcgagaactacgagatcgagctgaactgcagcagcatcgagaatttctgcaacgtgctgaagaaccggaagctgtacaagagcaacaaagagaagcagatcgcccagctgttcaacgtgaagaagaacgaggataagcagctgtactccatgctgaaaaccctgagcggcagcaaggtgtccctgaaggacatcttctgcgacgatgagctgagcttcgacgagaacaagaagatcagcttctccgagaagtacgacgagaatgtggccgagtacgaggaactgctgggagacagattcgagctgattgagaaactgaaggccatctacgactggggcgtgctggccgagattctgaacggcgagaagtatatcagccaggccaagctggccatctataacgagcacagcaaggacctgaaaacgctgaagcagtacgtgaagtcctacctgcctaagaagtatggcgagatcttccggcggagcagcaagtccaacaactacgtggcctactctggccacctgaagggcaacgagatcaaccacaagtgcgaccagaacgagttctgcgcctacctgaagaaagaactgaacgagtgcaaggacgacgcctaccggtccatgttcgacaagatcgagttcggcaccttcatgcccaaacaggtgtccaccgacaacggcgtgatccctatgcagctccacgaaattgagctgaaagccatcctgaagaacgccgagaactatctgcccttcctgtccaaggccgatgatagcggcctgaccgtgtccgacaagatgatcaagatcttcgagtacagaatcccctactacgtgggccctctgaacacacacagccctaagagctggctgacccggaaggatggcaagatctacccctggaacatcgagcagatcgtggactacgacaagtccgccgaaaacttcatcgagaacctgaccagcaagtgcacatatctgcccaaatacgacgtgatcccaaagagcagcctgctgtatagcaagtacagcgtgctgaatgagctgaacaacctgaagatcgacagcagcgagatctccgtggaactgaagcaggatatctacaacgacctgttcctgaagtacaacaagatcacaaagcggcggctgagcgactacctggaaagcaagggcatcagctataagatcctgtccggcttcgacggcgacttcaagtccagcctgaaggtgtacagagacttcgccgcctacaacctgagcgtcgaggacaaagaagagatcatccggctgatcaccatctttggcgacgacaagagactgatcaagaagcggctgaaaaacaacttcgccgacaagctgagcgagtccgagatcatcaggatctccaagctgaagtactccggctggtccaagctgtccaaagaactgctgaccagagtgaacgccgtgtacaagcctaccggcgaagtgatgaacatcatcagcgccctgtggaacaccaacatgaacctgatgcagatcctgtacagctccgacttctgctgtgacgacagcgagaacaaaagcttcgagaagaagctctacgagctgaatagcttcgccggggagaaaagcctgagacaggccgtggaagaactgtacatcagccccaaagtgaagcggcctgtgtaccagagcctgctgattgccaaagagatcgagaagatccagaagtgccccgccaagaaaatcttcgtggaagtggccaggggcagccaagagaagaaacccaccgactccagaaagaagaaactggacgagctgtataagtcctgcaagaacgagtaccccaagcagtttgccgagctggaaaacacaaaggccgagcagctgaagtctgacaagctgtacctgtacttcacccagttcggcaagtgcatgtacaccggcgagaaaatcgacgtggacacactgatgcagcacaacagcatctacgatatcgaccacatctaccccaggtccaagatcaaggacgatagcctggacaaccgggtgctcgtgaagaaaaccgtgaacgccaacaagaccaacgagtatcccatcgacagccagatccgcgagaagatgggcgatttctggaagatgctgcgggacaaagagctgattagcgacaagaagtacctgcggctgatccgcagcaatcccctgtccgatgaggaactgtgcgccttcatcagcagacagctggtggaaaccagacagagcacaaaggctgtggcccagctgctggaacagctgtaccctaacaccgagatcgtgtacgtgaaagcctttatcgccagcgagctgcggcagacctacgacatgctgaagtgccgggaagtgaacgatttccaccacgccaaggacgcctatctgaacatcgtcggcggcaacgtgtacaacgtgcggttcacccacaacaaaatcaacttcgtcaagaagctccagctgaacgacaaagagtacaccatcaacctgaacagcatcctcaagcacgacatccctggcgcttgggttgcagaaggcgagcagagcctgaagattgtgaagggcaccatgaacaagaacaacatccggtacacccgctacgcctttaagcagcacggcggcctgttcgaccagaatatcctgaaaaaaggcaaaggccaggtgccaatcaaggccaacggcaagagaaacgacatcgagaaatacggcggctataacaaggccgccagcgcctactttagcctggtcaagtacttcgacaaaaagggcaagagcgtgatccagttcgtgcccgtgaacctgtacaacgagaaggactaccagaacaaccccaaagaatacgtgtccaatatcgtcgagttcgactgcgagattctcatcccctatgtgaagtataacgcctgcatcagcgtggacggcttcagaatgaacatctccagcaagagcggcaaccagatcttctgcaagcccgccatgcagctgatcctgggctacgataacgagaaatatgtgaaaggcctcgtcagctgcaagaccaagggcttcaccaacgatctgatctacaagtacaatatcgagaagtctaacaatctggccctgtacgacctgctgatcaacaagattaagagcaccatcctgagcgtgaagttcgagaagctggcctccgatatgctggccggcagagagaagtttgagctgctgagcctggaagaacagaccgatgtgatctttgagatcctcaagatcctgcactgcaacgtcgtgaccggcgatctgaagatgatcggcggctctggcaagtccggcatcgtgtctatcaatagcgccgtgtccaacaccaagggcgtgaagtctgtgaagctgattaaccagtctgtgaccggcctgtacgagcaagagattgacctgatcaagggatcc

SEQ ID NO: 284 - DNA, 3993 bp, synthetic construct
  misc_feature 1..3993: note = Synthetic sequence or unknown origin
  source 1..3993: mol_type = other DNA
ggtaccggcaagaactactacatcggcatcgacatgggcaccgattctgttggctgggccgtgaccgatgaagagtaccggctgctgaagtccaagggcagagatctgtggggcagctacctgtttgaagaagcccaggccgctgctcagcggagaagctttagaaccgccagaagaaggaccgccaggaccagacaaagactgctgctgctccagagcctgttcgccgaagagatggctaaggtggaccctctgttcttcctgcggctgaacaacagcagcctgttcctgcaagacaaggacggcaagctgagatgctctgacgccctgtttggcgaccccagctacagagacaaggattacttcgccgagtatcccaccatctaccacctgagagctgctctgctgcagggcgaagtgaaggacatcagactgctgtacctggccatccaccacatcatcaagaaccggggccacttcctgttcgagagccagagctttagcgtgggcgatacccagaccgtgcgggaaaagtttaccgccatcaacgcctttctgagcgacagagagatgcccacactggaactgtctgccctgtctgaaggcctggaagtgctgagaaacagccggatcggcaagcgggataagcagctgagactgaaggatatcttcaagacaggcggcgagaagtccctgatcgccctggttaaggctctgaccggcggctccgtgaacctgaaagaactgtactgcgccgaggaatccttcgccgatgtgtccgtgttcagcttcgagaaggccagcttcgacgagacagatctgcctgccatcgagaacgccgtgggacaagaagaagccgagctggtcctgctgctgaaaagcgtgtacgattggagcgtgctgtgcgccatcatgggcgaagaacagttcatcagcctggccaagaagaaaatctacgagaagcacaaggccgacctgtgccggctgaaagagtacatcagaaagaattgccccgagaagtacgccgacgtgttccggcggagagagaagaagtctaactacgccgcctatatcggcatggacaagcagaaaggctgcgccaagtgcaagagaggcgacttctacgccttcctgaagaaagagatcaagatcgaggacgagtacatcctgaccgagatcgagaagggcgagttcctgcctaaacaggtgtccgacgctaacggcgtgatcccctatcaagtgcatctgctggaactgaaggccatcctggccaatgccgccggaaagttcccattcctgacagacgagagagatggcagcaccgtcgccgagaagatcatctccctgatgaccttcagaatcccctactacgtgggccctctgcacacacagtctccatttgcctgggccgtcagaaagagcggctacgagagaacaagcgtgaccccttggaacttcgacagcgtgatcgatgctgacgccagcgaggaacagtttatccggcggatgaccaacaagtgcacctacctggctggacaggatgtgctgccagccaatagcctgctgtactccgagttcacctttctgaacgagctgaacaatctgcgcgtgaacggcgtcaagaacgacgccgccagaaagctgatctacgagtacgccaagcagcacaagaaagtgaccctgaagaattgtctggccctgctgatcagagagggcctgctgcctgttggaagcagagccgaggaaacattcagcggcatcgatggcgacttcaagacctctctggccccttggtacgacctgagattcctgggcaacaagatcgaaacccaccgcgagatgtgcgaggaaatcatcatctggatcaccctgatcagcgacaaagagcgcctggaaaagcggattcggagagcctacggcaccatcctgagcgacgaagaaatcaagcggttcaagggcctgaactactctaagtggggcagactgagcgccgtgctgctggatggaatcgtgtctcctagatgcgccgacgagaatggcgagcccctgacaatcattagagccatgagagccaccggcgagaacttcatgcagctgctgagcgccaaatacggctaccaagaggccatcgacgcctacaatgccgagaatgcccctagaggcaaagtgacctacaagaccgtcgaggacctgtactgcagccctagcgtgaagagagccatctggcggacagtggaactcgtcagagagatcgccaagatttgcggcggagcccctaagaagctgttcatcgaaacagtgcgggaagtgaacgacgatcggagaggccagagaaccgtgtccagaaagcagcagctgatcgacctgtacaagaacatcaagaaagaggaacgcgactggatcgccgagattgagaacaccgccgacaagaagttcgactccgaccggctggtgctgtactataggcagctgggcagatccatgtacagccagaagcctatccggctggaagatgtgttcgacaccaacatctgcgacatcgaccacatctaccctcagagcaagatcaaggatgacagcctggacaacagagtgctggtgttcaagaccgagaataccgccaagggcgacagataccctctgtctgccgatgtccgcgagaagatgattagcttttggagagagctgaaggacagagccctgatcggcgagaaaaagttcgagcggctgaccagaaccaccgctctgacacaagaggaactggccgacttcatcaaccggcagctggtgtctaccagccagtctacaaaggctgccgctcagatcctgggcgagatcttccctgacacagagatcgtgtatgccaaggccggcaacgccaacagattcaaggacgagaacaagattgtgaaagtccgcgagctgaatgacctgcaccacgccaaggatgcctacgtgaacatcgtcgtgggcaacgtgtacaacaccaagttcaaccacaacgccgccgtgtacttcagagatcacggcgtggacagctacaacctgaagaacctgttcacccacgacatccctggcgcttggaaagtgtccgagaaagaaagaatcctgcagaccgtggccaaaaacacctgtcgggttgtgcggatgacagagaacggcaagggcaagctgttcgacatccagcctaagagcgccggcaaaaacgccgatctgatccctctgaagatctgcggcgccatctccgatacagctaagtacggcggctatgatagcgccaccaccgcctactttatgctcgtgcggtctaagggcaagaaaggcaaggtggccctgagcctggaagcttacccactgtggcttgacaaaagaggcggaggcgccaaagaggacaagctgaggttttgtgtggaacgcgccggactcaaagaacccgagatcatcgtggacaacatcaagctgaataccctgttctgcatcgacggcagctatgcctggctgagaggcaagaccggcaatagagtcgtgtggtgcaatgccaacgagctgttcctggacgaagagagcatgcggaccctgaaaaacatcagcaactacatgcgggaccgcaagagactgaacaagcctgatctgtgtgccggcgataagatcaccgccgagtgcaacattagactgtacgacgccctggtggaaaagctgggatcttctgtgtatgccggcctgagcgtgaaaggccaggtgccatttctgagaggaaagagagaggcctttgccgagctgagccgggaagatcagtgcaagattatcttcgaggtgctgcacctgatgcagtgcaactccgtgctgagcgatttttcttctcttggcggcgtggcccatgccggctctatcctgtctaacaagttcgtgcaggacatggacatcaagatgatttttcagagccccaccggctactatcggagagtggtggacctcaaagagttcatcggatcc

SEQ ID NO: 285 - DNA, 4002 bp, synthetic construct
  misc_feature 1..4002: note = Synthetic sequence or unknown origin
  source 1..4002: mol_type = other DNA
ggtaccaaagagaacggcaacgacagacggcagggcacctactatattggcctggacgtgggcacaaatagcgtcggatgggccgtgaccgacgagaactaccaagtgaagaagttccacggcaacgccatgtggggcgtcagactgtttgaagaagcccagcctgccgccgatagaagaacatctagagtggccagacggcggctggctagaagaaagcagagactgatgctgctggaatttctgttcgccgaagagatccacaaggtggaccccaatttcttcagacggctgcacgagagcgacagatgggaagaggatagagccaccagatgtccctacagcatcttccacgatgccggcttcaccgacatcgactaccacagaaactaccccaccgtgtaccacctgagaagcgagctgctgcagagcacacagcctcatgatgtgcggctggtgtttctggccatccaccacattatgaagaccagaggccacttcctgtacgagacaggcgacaatggcgacgagattctgacagtggcccaggccttcgaccagctgaatcagtacctgcaggacgagtacgaccagatgctggaacccgtggaccagaacgcctttctggacctgctccagaacaacggcatgggcatcacagccaagaaaaaagccctgcacggcgcctacggcctggtgtctgatatctccatcctgaagttcagcgccctgatcgatctgatcgctggcgcctctgtgaagcctgatgtgctgtttggcgatcagaccctgaaggacctgaccagcatcaacctgaagaacggcctggatgagctggaacagtatagagaggccctgggcgagagattcgccctgctcgagttcaccaagacactgttcgatgccgccagactgagccagatcagaaagggctacacctacatcagccaggccaaggtggcccagtaccaagagaatgccagcgacctgcggaagctgaagcagtatgttcgggcccagattcctgaccagtaccggatgatcttcagcgagaagaagaagggcctcgacaactacgccgcctacagccagtacaagctgacccagaaagactaccgctgcgatcaagagaagttctgcaagttcctgctgggcaagcaagtgggcctgcctgagcctcaagagtccgatagagagatgtgcgagatctaccggaagatcaaggacggcgccttcctgcctaagctgagaagctctgagaacggcgtgatcccctatcagctgaacagacaagagctggtgcagatcctgaagcaggccagcctgtacctgcctttcctgaatcacgtggactccgatggcctgagcgtgtccgacaagatcatcaagaccttcgagttcagagtgccctactacgtgggccctgtgtctgatcaggctggacaccactgggccgtgcggtttcagggcaaagagaatgagaagatctacccctggaacttcgagcaagtgatcgacctggaaagatccgccgctggcttcatggaagatctcgtgggcagatgcacctacacaggcgagcctgtgctgcctaaggatagcctgctgtactccgagttcatgctgctgaacgaagtgaacctgatcaagatcaacggcaagagcctgcctgtgaacgtgaagaagcagctggtccaggacctgttctaccacagcagcaagaaagtgaccaagaagggcatcgtccactacctgacctccaagggcctgatgacccagtccgatgaactgaatggcgtggacgaccggatcaagagcaccctgagatcctaccacgacttcaaggacattctgaagcggaccggcgacagagacatggtggaaaacatcatccgcagcatcctggtgttcggcaacgatctgacaatgctgcagcggtggctgaagaacaacacccacgacctgaccgaggaagagatcagacggatctgcaacctgcggagcaagtacaaagagtggggcagactgtcccggaccttcctgacagagatctactctcccgatgagtggggcgaagccaagagcatcatggactacctgagagacaccagctgtaacctgatgcagctgctgagcaaccagtaccagttcgccgatcaggccaaagctcacttcgacgccctgatgggcaatggccagacactgtctcagaagctggacgacctgtacgtggcacccgccgtgcgaagatctatcagacagacactgcggatcgtggacgagatcgtggatattgagcacggcgtgcccaagaaaatcttcatcgagatggcccgggacaacgcccaagaagtgaaaaagagccggaccgagagccggaaggataagctgattgccctgtacagagcctgtcacgaggatagcggagagctgtttcagcagcttgagcaagaagaggacagcagactgcggagcgacaagctgttcctgtactacacccagttcggcaagtgcatgtacagcggcgagcccatcgatctggaatctctgctgagaggggagctgttcgacatcgatcacatcttcccacagagcaaagtgaaggacaacagcctggacaacagagtggtggtcatcaacaccctgaaccgcgagaagtccaacatctaccccatccaaggcgagatcaggcggaagatgcagcccttctgggccatgctgaagtctaagggcatgatctccgagaagaaatacgaccggctcgtgcggaacaccgagctgacagaagaggaactgagcagctttgtggcccggcagctggtggaaaccagacagtctacaaaggccctggccaccatcctgcaagagacatatggcgatcaagtgcgcctggtgtacagcaaggccggcaacgtttccgatttccggcagcagttcgagctggtcaagtgcagagatgtgaacgacctgcaccacgccaaggacgcctacctgaatatcgtcgtgggcaacgtgtacgacaccaagttcaccgaggtgttcttccggaacatcaagaaagagaagtacagcctgaagaaggtgttcgagttcgacacccctggcgcctgggataagaccgagtctatcaagaccgtgaaaaagtacatggccaagaacaacgtgctggtcacctggatgccacaagagaagcacggcaagatcttcgacctgatgctcgttagagccggcaaggccaaagtgaacaaaaagcagggactcgaccaagagaagtatggcggctacaccatgcggtactgcgcctacttttgcctggtggaacaccggatcggcaagaaaagagtgcggagcatcaagcccgtgtacatgtatcagaaggtggcctacgagcaggaccctctggaatactgcagaaacatcctcatgctgcacgaacccagagtgatcgtgcagaaaattctcgtgggagccctcatggaactgaacggcaaaagactgaccctgacagccggcgaggaaggcagaatcaagctgaaccacacctaccagctgattgtgggcgagaagtataaccagtatatcaagaacgccagcaagtactacgaccggtgcacagcccagaaagccgaactgcccgtgacacagtttgacggcatcagcgacaaggacaatatcgatctgtaccacgagctgatccggaagtgcaagacctccatctacagcagctgtttcggggccttcaacatcattgccgaagaaatggaaaagtgcgaggacatcttcaccggcatgagcacactggaccagatcaagattctgctggaagtgatcaaggccttccggtgcaacgccgtgtacgccaatttcaagcagctgagcggacagcaagtgcggggcagaatccggatcaacgataagatcagcgagctgaacaccgcctatctgatcaaccagagcgtgaccggcctgtacgaacacagaatcgacctgctgaagggatcc

SEQ ID NO: 286 - DNA, 4002 bp, synthetic construct
  misc_feature 1..4002: note = Synthetic sequence or unknown origin
  source 1..4002: mol_type = other DNA
ggtaccaaagagaacggcaacgacagccggcagggcgattactatgtgggaatcgatgccggcaccaactctatcggatgggccgtgaccgacgagaactacagagtgaagaagttcaagggcaacgccatgtggggcgtcagactgtttgatgaagcccagggcgccgacgagagaaggaccaatagaacagccagacgccggctcgtgcggaagaaacagagactgatgctgctggaactgctgttcgccgaagagatcgccaaggtggaccccaacttctacctgagaatgcaagagtccggcctgtggcgggatgataagaccggcgatagccagttcgccctgttcaacgatgagggcttcaccgacagagagtacttccagaagtaccccaccgcctaccacctgagatgtgaactgctgcacagcgaggaccctcacgacatcagactggtgtatctggccctgcaccacatcatgaagaccagaggccacttcctgctggacggcgtggaagatgtggaacagatgacaacactggatggcgctctggacgagctggccgcctttctgcaagaggaatacgagctgtacttcgtgcccaagaaccgggccgagtttatcgccgctctggaaaccagagacatcggcatcaacgcccggaagaaagccctgaaggatgcctatggaaaggccgaggatgccgaggacctgtctattcctgctctgctggatcttctggctggcgccgctgtgaagcctgaggtgctgtttgaggacaacagcctgaaagacggcgacgtgtccagcatcagcttcaagaacttcgaggacgagcaagagaactactccgagctgctgggcgacagaatggaaaccctgctgaaagtgaagaacctgttcgacacagcccagctggccctgatcctgaacgacaagacatatatcagcgaggccaaagtggcccagtacgagcagaatggacacgagctgcatctgctcaaagagtacgtccggaagagaatccccgacaagtacaagctgatcttcgacgagaagaaagagaagctggacaactacgtggcctacagcggcgacaaaagaagatccggcgcctacacctgtactcaagaggccttctgcaagttcctgcggggcaagaatgtggaactgcctgagcctgatgccagcgacaccgagatgtgtaccatctacgccaagatcaaggacaacatcttcctgcctaagctgcggagcagcgagaacggcgttatcccctaccagctgaacaagcaagagctggaaagaatcctggaactggccgctcagtacctgcctttcctgaacgtggtggacgatgatggcctgagcgtgcgcgagaagatcgtgaaaaccttcgagttcagagtgccctactacgtgggccctgtgtccgataaggccaagcacagatgggctgtcagattcgatgagaaggccaagaccaaggtgctgccctggaatttcgagcacgtgatcgataccgagggcagcgccattgccttcatggaacagctgatcggcagatgcacctacaccggcgagaaagtgctgcccaaggatagcctgctgtactccgagttcgctctgctgaacgagctgaacctgctgaagatcaacggcaagagcctgcctatcaacgtgaaaaagcagctggtgcaggacctgttctacagcagcaagaagaacgtcaccaagaaaaccatcagccggtatctgagagccgagggcctgatgaccgaagaggatgaggtgtccggaatcgacgataagatcaagtccaagctgcggtcctaccacgacttcagagatatccttgtgcggaccggcgacaccgccatggtggaagatatcatccggtccatcctggtgttcgggaacgacaaaaagatgctgcggcggtggctggaacacaacacccatgatctgaccgaggccgagatcaagcacatctgccacctgaactaccaggactggggcagactgagcgagatcttcctgaccaagatctacagccccgatgagaatggcgaggctaagaccatcatggactacctgcgcgagacaaactgcaacctgatgcagctgatgagcgaccagtacctgtttgccgagaacgccaagaagcactacgacgagctgttcggcaacggccagacactgacagctcggctggacagcatgtatatcgcccctgccgtgcggagatgcatcagacagaccctgagaatcgtggacgagatcgtggacatcgagaagtccgtgcctaagaaaatcttcatcgagatggcccgggacagagcccaggatgtgaagaagggcagaaccgagtccagaaaggataagctgatcgccctgtaccggtcctgcaaagaaaccggcaatgagctgttcaagcggctggaaaacgaggatgagaaccggctgagaagcgacaagctgtacctgtactacacacagctgggaagatgcatgtactccggcgagcccatcgacctggaatctctgctgagaggcgagctgtatgacatcgaccacattttcccacagagccgcgtgaaggacaactccctggaaaaccgggtgctcgtgaagaacaccctgaaccgggaaaagaccaacgagtaccccatcaagtccgagatccggaagaagatgcaaggcttttggtacggcctgcggcagaagggactgatcggccagaagaaactggaacggctgaccagagccacacctctggctgaagccgaactgagcagctttgtggccagacagctggtggaaacccagcagtctaccaaggctatggccacactgctgcaggacatctatggcgacaaagtgcggatcgtgtacagcaaggccggcaacgtgtccgagttcaggcagaagtttgagttcatcaagtgccgggacgtgaacgatctgcaccacgccaaggacgcctacctgaacatcgtcgtgggcaatgtgtacgacaccaagttcacccagcggttcttcgtgaacatcaagaacgagaagtactccctgcggcggatcttcgagtttgataccgacggcgcctggaaagtgggcgagacaatccggacagtgaaaaagtacatggccaagaacaacgtcctggtcaccagaatgcccagagaagtgcggggagccctgttcgatctgcagctcatgcctgccacaaagggacagctggccagaaagcaaggcatggacattggcagatacggcggctacaacaagctgacaggcgcctacttctgcgtggtcgagcacaccgagaagaagaagcggatcagaaccatcgaacccgtctacctgtaccagaagtccgcctacgaaagcgaccctgtggcctactgcaaagacattctgggactgtgcgagcccgtgatcattgtgcctgaagtccggatcgacagcctgctggaaatcaatggcagcagattcatgatcagcggccggaccggcaacagaatcgtcgtgaagcacacatatcagctgctgctgagcaacgccgaggaacagtacgtgaagaatctgggcaagtacaacgacagatgcgccgccaagaaagaagaactgcccgtcacagagcacgacggcatctctgccgaggaaaacctgaacctgtatcggctgctggtcaagaaatgcaacgagaaggtgtactccacctgtttcaccaccttcatcatcatgggcaacgagatgaaggaatatgagaacaagttcattgccatgagcatctgggagcagacaaagattctgctggaagctctgaaggcctttcggtgcaacgccgtgtacggcaactttaaagagctgagcggcaagggcaccagaggactgattctgatgaacaagaagatctctgagctgtcctccgcctacatgatcaaccagagcatcaccggcctgtacgagcacagagtggatctgctgaagggatcc

SEQ ID NO: 287 - DNA, 4017 bp, synthetic construct
  misc_feature 1..4017: note = Synthetic sequence or unknown origin
  source 1..4017: mol_type = other DNA
ggtaccaaggccaactggaattacagcgtgcagggcaactactacatcggcctggatgtgggcacaaattctgtcggctgggccgtgacagacgagcagtaccacatgaagaagttcaagggcaacgccatgtggggcgtcagactgtttgaggatgccaagagcgccgagcagagaagagtgtctagagtggccagacggcggctggaacggaagaaacagagactgatgctgctggaactgctgttcgccgaggaaatcgccaagatcgaccctcagttctacctgcggatgcgcgagtctgatagatgggccgatgagaagcagagcggcagcaagtacagcctgttccacgacaccgactacaccgacaaagagtaccaccagagctaccccaccgtgtaccacctgagaagcgagctgctgggaagcagccagcctcacgatatcagactggtgtatctggccgtgcaccacatcatgaagaaccggggccacttcctgtacgagatgagcgaccacagcaacgagatcatgaccgtgcctatcgctctggaagaactgcagcagtacatccaggaccactacggcagagacttcgagcccgagaacagagaacagttcgtgaccgagctgcagcggaacgatatcggcgtgacagagaagaaaaagatgctgaagaaggcctacggccggatcgacgagtgtgaagaactgggaatctctgccctgctcgaacttctggctggcgcctctgtgaagctggctgtgctgtttgccgatcctgacctgaagaatggcgaggtgtccagcgtgtccctgaaggacatcgacgagaacgccgacacctatgtggatgccctgggcgatagaatcggcctgctggaatccgccaagacactgtttgatgccgccagacttgcccaagtgcggggcgatcacacatatatcagccaggccaaggtggcccagtacgagcagaacagaagcgacctgcggcagctgaagagatacgtgcggagaacaatccccgacaagtacaacctgatcttcagcgagcggcaagagaagctgaacaactacgccgcctacagccagtatggactgcagcacggcgattaccactgtggccaagaggccttctgcaagttcctgctgggcaaagaagtgggcctgcctaagcctgaggaatccgataccgagatgtccaccatctacgccaaagtgaaggacggcatcttcctgcctagactgagaggcagcgagaacggcgtgatcccctaccagctgaacagacaagagctggtgcagatcctgaaaaacgccagcacctacctgccttttctgaacagagtggacgaggacggcctgagcctgcagaagaagatcatccagatcttcgagttcagggtgccctactacgtgggccctgtgtctaatagagccggacaccattgggccgtgcggttctctggcaaagagcaagagaaaatcttcccgtggaacttcgagcagatcgtggacacagaaagcagcgccgctgcctttatgaagaatctcgtgggcagatgcacctacaccggcgagcctgtgctgcctaaggatagcctgctgtactccgagttcgccctgctgaatgagatcaaccccatccaagtgaacagaaagcccctgcctctggacgtgaagaagcagctggtccaggacctgttctacagacccgagaagggcacccagaaacggaccgtgaccaagaaggatatcagcaactacctgatcagcagaggcctgatcggagagggcgacgagatttctggcgtggacgacaaagtgaaaagcaagctgcggtcttggtacgacttcgaggacatcctgagcagaaccggcgacagagacatggtggaagatatcatccggtccatcctggtgttcggcaaggacaagaaaatgctgcggcggtggctgaagaaaaacacccacggcctgaccgaggacgacgtgaagcacatctgctgcctgaagtaccaggactggggcagactgagcaagaccctgctgaccgagatctacagccccgataagtacggcgaggccaagaccatcatggactacctgagagacaccaacctgaacctgatgcagctgctgagcgacgacttccagttcgcctctaacgccaaggctcacttcgacgccctgtacggcaatggccagacactgagccagcggctggacaacctgtatattgctcctgctgtgcggcggagcatccggcagacacttagaatcgtggacgagatcgtcgacattgagaagggcgtgcccaaaaagatcttcatcgagatggccagggacgacgccagagccatcaagaagaagcggaccgagagccggaaggacaagctgatctctctgtacaaggcctgtaaagaaggctccggcgagctgttcgagagactggccaacgaggacgagaatagactgcggagcgacaagctgtacctgtactacacccagttcggccggtgcatgtacagcgaggaacctatcgtgctggacgctctgctgagaggcgagaagtacgacatcgaccacatcttcccacagagcaagatcaaggacaacagcctggacaacagagtgctggtcaagaacaccctgaatcgggaaaagaccgacgagtaccccatcaagaccgacatcagacagaagatgcagcccttctggtactccctgaagcagaagaatctgatctcccagaagaaatacgaccggctgaccagaggcaccaagctgaccaatgaggaactgagcagcttcgtggccaggcagctggtggaaaccagacagtctacaaaggccctggccacactgctgaaagaaacctacggcaacatgacccggatcgtgtactctaaggccggcaacgtgtccgacttccggcagaaattcggcttcgtgaagtgccgggacatcaacgacctgcaccacgccaaggacgcctacctgaatatcgtcgtgggcaatgtgtacgacaccaagttcaccaagcagttctttgccaacatccagatggaaaactacagcctcaagaaggtgttcgacttcaacacccctgaggcctggaacaccgtggaatccatccagaccgtgaaaaagtacatgacgaagaacaacgtgctcgtgaccagaatgccccacgaagccaaaggcgccctgtatgacctgcagatcatgcctgccggaaagggccagctgccaaagaaaaatggcatgagcaccgagcgctacggcggctataacaagctgacaggcgcctacttctgcattgtcgagcacacggacaaaaagaagagagtccggaccatcgagcccgtgtttctgtaccagaaagaggcctacgagcgggaccctgtgatctactgtcagagcatcctgggcctgaaagaacccgtgatcattgccagcaaagtgcggatcgacaccaccatggaactgaacggcaaccggctgctgattaccagcaggaccggcaacaccatcatcttcaagcacacctaccagatgatcgtgggctccgagtttgagcagtatatcaagaacctgtccaagtacaatgaccggtgcaaggccaagcgcgaggaactgcctgtgaccagctttgacggcatcagccgcgagaagaatatggaactgtaccagctcctgacacggaagtgcggcgagagcgtgtacagagtgtgtagcagcgccttcacaatcatgggcaatgagatggccgcctacgaggacaagtttgccggaatgagcctgtggacccaagtgaaactgctgctcgaggccctgaacgccttctgctgtaacaccacatacgccaacttcaaagagctgtccggcaagggcaccagagacagagtcgagttcaacaagaatctgtccgtgttcagctccgccttcctgatcaatcagagcgtgaccggcctgtatgagcacaagattgacctgctgaagggatcc

SEQ ID NO: 288 - DNA, 4017 bp, synthetic construct
  misc_feature 1..4017: note = Synthetic sequence or unknown origin
  source 1..4017: mol_type = other DNA
ggtaccaagaacaacggcaacgaccggatcaagggcaactactacatcggcctggacgtgggcacaaattctgttggctgggccgtgaccgaccacgactacaacctgcacaagtttaagggcaacgccatgtggggcgccagactgtttgatgaagcccaggatgccagcctgagaagaaccagcaggaccaacagaagaaggctggccagacggaaccagagactgctgctgctggaactgctgttcaccgaagagatcagcaaggtggaccccgcattcttcctgcggatggaagaatctgccctgtggctggacgacaagaccaacaagatgtgccggttcagcctgttcaacgacgccgacttcaccgacaaggactaccacagaaagtaccccaccatctaccacctgagacacgagctgatgaccagcagcgagccccacgacatcagactggtgtatctggccctgcaccacatcatgaagtccagaggccacttcctgtacgagacaaccagccgggacgacagcatcagacccatcgaggaagtgttcaaggacctggaaaacctgctcgagagcgagtactatatcgccctggaacctgacgacctgaacggcttcctgaacaccctgaccagaaaggatctgggcatcaacgccaagcagaagctgctgaaagccgcctggggcggcaaagagaacaaagagacactggtcaacctgagcgccgccattgatctgctggccggcaagtctggcatcaagctgagcaccctgtacaacgatgagtctctggctggcgtggacccagagaagattagcctggccaacggcttcgaagagaacctggatgatctgagcgccatcctgggagacagaatcagcctgctgatccagctgaaagagctgtacgatacagccctgctgggccagatgctgcagggctatgattctatctctgccgccaagatcgccctgtacgacaagaacaagaaggacctgcgggccctgaagcactacgtcagacagaatgcccctgagaagtacaaagaggtgttcgtcctgaagaagtccaagctgaacaactacagcgcctactccggctacaagaccagaagcggcgatcacagctgcagccaagaagagttctgcaagtacctgatcagctgcaagctgcccgctcctaaggccgacgacgagatcatgaaccggatcttcgatgagatcaaagagggcaccttcctgaccaagctgagaggaaccgagaacggcgtgatcccctaccagatccagagaatggaactgagggccattctgaagaacgccagcaagtaccacacctttctgaacggcaaggacgaggacggcaacaccgtgtccgagaagatcgagaaaatcttcgagttcaggctgccctactacgtgggccctctgaacaagcaggccggatcttattgggccgtgcggttccctgacaaagaaggcgagaaggtctacccctggaacttcgagaagattgtggataccgaggccagcgccaagaaattcatgaccaacctgatcggcagatgcagctacaccggcgagagagtgctgcctaaggatagcctgctgtatagcgagtacatgctgctgaacgagctgagcccactgaacatcaatggcaagcccgtgtccgtggaaatcaaacaggccatcgtgaacgacctgttcaagaaagagaagcgggccgtcaccaagaactccatcagaaactacctgctgagccggggctacatcgacaagagcgtgggcaaagatgacatcggcggcatcgacgataggatcaagacaagcctgcggagctaccacgacttccaggcaatcctggatagaaccggcgaccaagagatggtggaagatatcatcctgcacatcctggtgttcgggaacgacagagtgatgctgaagaaatggctgcggaacaacacccacggcctgaacgaggaagagtacgaccacatctgccggctgaagtacaccgattggggcagactgagcaagacattcctgaccgacatcctgtctgtggaccctgaggaaggcacaggcgagctgcacaatatcatctacatgctccggaacacgaacaagaacctcatgcagctgctgtccgaccggtatagctttagtgctcaggccgaggaacaccggaaagaactcgtgggcgaaaagcagagcctggccgagagactgaacgacatgtatattgctcccgccgtgcggagatccatccggcagacacttagaatcgtggacgagatcgtggacatcgagaagtccgtgcctgaaaagatcttcatcgagatggccagagacagcagcaaggccatgaagggcaagagaaccgagagccggaaagagaaactgctggccctgtatgccaacagcaaagaggaagccgccgagctgctgccaaagctgaagaatgaggacgacaaccggctgcggagcgacaagctgtacctgtactacacccagttcggcaagtgcatgtacagcggcgagcctatcgatctggatgccctgatgagcggccagggcttcgacatcgatcacatcttcccacagagcagagtgaaggacaacagcctggacaacagagtggtggtcaagaataccctgaaccgggaaaagacaaacaactacccgatcgagaagaacatccagcggagcatgagaagctactgggacatgctgagagcctgcgacatgatctccagcaagaagtacgaccggctgatcagagccacacctctgaccgatgaggaactgagcgcctttgtggccagacagctgacagaaacccagcaggccacaaaagccctgaccgtgctgctgcaagagacatacggcgatctgacccggatcgtgtttagcaaggccggcaacgtgtccgacttccggcacgacttcgatatgatcaagtgccgggaagtgaacgatctgcaccacgccaaggacgcctatctgaacgtggtcgtgggcaatgtgtactgcaccagattcaccgaccggttcttcgccaacatccacaacgagaactactccctgaacaaggtgttcgccttcgatgtgcctggcgcctggaagaaagaagagacaatcaagaccgtgaagaaaaccatgagcaagagcaaccccgtggtcacccggatgcctagagaagtgaagggccagctgttcgacctgcaactgatgcctgccggaaagggacagctggaaaagaagcggtccctgagaatcgagcagtacggcggctacaacaagatcaccggcagctactatttcgtggccgagcacacagtgaaagaaaagagaatccggtccatcgagcccgtgtatctgtacgcccagaagcagtacgaggccgatcctaaagcctacgccgtgtctgtgctgggactcgtggctcccgagatcatctgtaaagagattcgggccgacgctctgctggaaatcgacggcagcagaatgtacatcagcggcaggaccggcgacaactacgtgtgtgaacatgcctaccagctggccatcgacgtggacaaagagaagtatatcaagctgctcacgaagtacgccgagagatgcgctgctagaagggcccctgtggccatcaccaaatacgatggcatcaccgccgaggacaacgaggaactgtacaactacttcctcaagaagattgaaggcggcgtctacgccaagctcctgaaaaacatgaagaaagacctggaagagagcaagaacacattcctgtccaagagcctgtatgagcaggccctgatcctgctcgaaatcctgaagcctttcagaagcaatgcccagaacgccaacctgaaggatctgtgtggcaagggcaccgtgggcagaatcattgtgaacaagaaactgaacatgcacgcctccgccaagctggtgcatcagagcgtgacaggactgttcgaggtgtccgaaaatctgctcggcggatcc

SEQ ID NO: 289 - DNA, 4020 bp, synthetic construct
  misc_feature 1..4020: note = Synthetic sequence or unknown origin
  source 1..4020: mol_type = other DNA
ggtaccaagaagtacaacatcggcctggacatcggcaccaattctgtcggatgggccatcgtggaagatagcaccaacaaggtgctgaagaagggcaagaaaagcctgtggggcgtcagactgttcgagacagccgaaaccgccgaggaaagacggaagcacagaagcagcaggcggagatacgaccggcggagacagagaatcaagctgctgcagaaagagttctgcaacgagatcaacaaggtcgacgacaagttcttcaccaagctgaaagagagcaagtaccacgagaaggacaccctgaacaagaccgtgaagctgacaaagaccgagaagcagatgctgaaggactactacgagaagaaccccaccatctaccacctgaggaactatatcgccaacaccaccgagaaggtggacatcagactggtgtacctggccatccaccacatcatcaagtaccggggcaactttctgtaccccttcaagaacatcaacatcgacaagctggatatcgccgctcagctgcagaatgccttcagcctgctgtacgataccaccgccatcgaggacgaggccttcatcgaggaaatcgacttcaacgagctggaaaaggacctgctgctccagagcaagaaagacaccatggtcgagatcgacaagatcgtgaacaagttcctggacaagaaaaccaccagcgagatcaaacagatgctcgtgggcaacagcttctccatcagcaagctgttcaacaaagaagaggacaaggacttcaagatcaagttcagcaacaacgagtacgaagagaagtacgccgagatcgagcagaactaccccgagaacatcgaagtgctgaacgagttcaagaacgtgtacgatatgatcttcctgaagaagatctttaaggacaccgacgacgtgtccatcagctcctacatgatccagaagtataaccagcacaagaaggacctgaagttcctcaagaaaatcttcagccaggacaacaagaacgacagcaaagagctgatcaagctgaggcggaagcactacctggaaatcttcaagagcaacagcaagcggatctgcctgtacgacacctacatccacaacaagatcgattacgagacattcatcaagaatatcgtgaaggccgccaaagagatcctgaacgacgagcagtacaataccaccatcaagaggatcgagaacgagaagttcctgcctcggatcaccgagaaagagaacagcgcctttccataccagctgaacaaagaggaactgatcaagatcatcgagagccagtccaagtactacccattcctgaagcagaagatcgacgaagagtacaagctggtcaagctcctcgagttcagaatcccctactacgtgggccctctgaacaacaccacaagcaaggccagcgtgaagaacaccaatagctggatcgtgaagaaaagcaacgagaatatcacgccctacaacttcgacgaggtggtggacctggatgagactgccgagaagtttatcagcaagatgcaggccagctgcacctacctgctgaatgagaagtctatccccaacaacagcatcctgtacagcaagtacaaggtcctcaacgagattaagcagatcaggatcaacggcgagaaagtgtccgtgaacctgcagaacaagatctacaatgagctgttcctgaaaaaggccggcaccatcaccgacaaggtgttcagaaactacctcaagcagaccaatgagatccggatgtacgacggcatcaagattaccggctacagcgccgatggcaagttcgccaacaacatgcagccctacatcgatttcttcggcgagaacggcatcttcaaaaacaccaactacaagctcaacgacgccgaagtgatcattcactggatgaccatcttcgaggacaagaagatcctcaagcggaagatcaccaagacataccccgagctgagcagcgacgccatcaacaagattctggtcaaaaagtataagggcttctcccggctgagcaaaaagctgctgaacggaatctactacacagagaaggataccaagaacacaaagaccatcatcgaactgatggaagagacaaacgagaacttcatgcagatcctcaacaacaagaagtacgagttccagaagcagatcgacgacctgaacgacatcaagcaggacgacaagattagctacgagatcgtcaacgaactggccacctctccaagcaccaagaagggaatctatcaggccctgaaagtggtggacgagctggttaagtacatgggctacgaccccaacatcatcagcatcgagatggccagaggcaacagaaagagccggcggacaatcgaccggaagaacttcctgatcaacctgtacaacaaataccgggacgacatcgagaactacgacctgctgttcaaagaactgaaagaaaccgagacaatcagcatgaagctgtttctgtacttcatccagcaaggcaagagcctgtactcccaagagcctctgcggattgagaagctggacagctatgagatcgatcacatcatccccaggactctgatcaaggacgactccatcgacaacaaggccctggtcctgaaagaggaaaaccaggacaaggccgcctccttcgtgctgcccgccaagtatagaaccatcaccagaatcgactggtggaagaagctgctggacaacggcttcatctccaagaagaagttctacaacctctgccgcagagagtacagcgacagcgatatcgagggcttcatcaaccggcagctggtggaaagccggcagattaccaagcacgtggccaacatcctcaaaaacttctacaagaagtccaagatcgtctacctcaacgccgacctgtccagcaactacagaaagaagtatgagctgtacaagttccgcgacatcaacgacttccatcacgcccacgatgcctacctggcttgtgtgctgggcaagtataagcaggactacctgaaagtcatcgactacgaggaactcaaagagaagaacaaagaactcttcgacaagaaagagtataataccctgaagtacggctatatcatcaacagcctggaagagaatatctaccacaaggataccggcgagatcctgttcgacgccacacacttcaaaaagatcgtcgagaacagcctgtaccagaacgatatcctgatcagcaaaaagaccgaaatccggaacggcaagctgtacgacgaaacaatcaacaaaaagggcgccaagggcgtgcccctgaagaaaaacatggccaccgagagatacggcagctacagcagcattaagcctgcctacgccgtggtcgtgaagtaccactacaagaatgaggacctccagaagatcattggcatccccatctacatcgaggcctttaccaaaaaggacaaagtgatcaaagaaaagtacatcaaagagttgctcaacctcgaagagaacgaccgcatcgacatcatccacgataagatccctttctacacgaccatcgagtacgacgggaagatctgctttctcgtgggcgccacagacaaggtggaagtgtgcaatgccaaagagttttacttctctaaagaaaagatgaaggaatggaagcacacgctcaacaaactgctgaacaaagaagagagcctgaaagagaacgacaacgagaacaaatacgaagaggacctggaaaacatcattaagtatatcgtgtccaagatggaaaaagagtacaaactgtacagcgagctggtcgagaagctgaagaacatgatcattaacaagattgacaagttttccctggaagaaaagaagcggatcatcctggaactgttccacctcctcaaagtgaacagcacaaccgccaacttcaagtttctgcaagaggccagcgccttcggccggatgaacaacaaaaccattagaagcgggaagctcgtcaacaactccatcaccggcctgcggaagaacatccacgagttcggatcc

SEQ ID NO: 290 - DNA, 4035 bp, synthetic construct
  misc_feature 1..4035: note = Synthetic sequence or unknown origin
  source 1..4035: mol_type = other DNA
ggtaccagcatccagagcgtgaagaaggactacttcctgggcgttgacatgggcacaggatctgttggatgggccctcgcctacatggactacagcgtggtcaagtacaagaacaagctgctgtggggcagccacctgttcgatacagctcagacagccgtggaagcccggctgaatagaagcaccagaagaagatacgcccgcagcgccgagagagtgaagctgctgcaagagctgtttgccgaagagatcgccagagtggacttcggcttcttccagcggatggaagagtccagactgtggcaggacgacaagaccgagaatcagaagaacaccctgttcaacgacgtgggctacgacgacggcatctaccacagcgagtacaagacaatctaccacctgagaaaggccctgatcgacggcggcaagtcttttgacgtgcggctggtgtatctggccctgcaccacctgattaagcaccggggacactttctgttcggcgacagagttctgggcgacgtgcggaatttcgataccgcctttaaggccgtgtccagcgtggtgtatgaagtgctgggagccgagctgaaggtggacgatatcagcaaagtgggcgaagtgatcaagaatcggcgcgacggcctgacaaaaagagaggacgccctgaaggccctgtttggcgtgcagaaaggcgacaagcggatgcaagaactgatcaagctgatggtcggaagcaccgccgacctgaagaaactgttcatgctcgaggaactcgagaacaagtccgtgaagctgagcgacaacaacgtggaagatgtgctgctgaacgtgtccgaggaactggacgaggattactacgccgtggtggacgccgtgaagatgatgtacgattggggcaccctggaaaacatcctgagcggccacaattacatctgcgagggcaagatcgaggcctacgagaagcacaagagcgacctggaacggctgaagcgggtcgtgaagagatacttcagcgccgactacaacaagatcttccggacagagaacgaggccgccaactactgtagctataccggcgtgtccaagctgcccctgaagaacggaaagaagtgcacccaggccgatttctgcgtgttcctgaaaaagctgctggtcaagaacgccgcctgcgagacagatgaggactacctgtacatcgtggaagaactggaaaagggcaccttcatgcccaagcagaccaccagccagaacagcacaatcccctaccaagtgaacaagatggaactgtgcaagatcctcgagaacgccgaggaatacctgcctttcctggccgagagggatgagaatggcctgaccgtgtctgacaagatcaagaagctgttcgagttcaggattccctactacatcggccctctgaacgacacccaccagaacaaaagagtgaacggcagctgctggatcgtgaagaaacagggcaaagtgtacccctggaacttcgacgccatggtggatacagacgagagcgccgagcggttcatcagcaagatgaccaacaagtgcagctacctgctcggcgaggacgtgctgcctgataagagcgtgatctacagcaagttcaaggtgctgaacgagctgaacaacctgaccatcaacggcgagagaagccctgagctgaagcaagaactcttcaacgagctgttcctcaagcagaagaaagtccggctgaaggacatcgagagctacctgagaggcagaggctacgaagtgaacgccattgccggaatcagcggcgagattaagaacaacatgagcagctacatcaccttcaaagagatcatcggcgacaaggccgacaacatcaccatgtgcgaggacatcatccgggccatcacactgttcggagctgagcccaagatgctgaagaggcggattgagaagcactacggggatgtgctgaccgccgacgagatcaagagactgtgcagactgaagtacaaggactggggcagactgagctacaaactgctgtgcggaatcaccgacgagaaaaccggcacctgtatcatcaacgccatgcaagagttgggcctgaacctccaagagctgctgagcagcagatacagctacatgagccagatcgacgaactcaacaacatcggcgagagcgtgggcatcagagaggaaatcgagctgtctgccctgtctcctgccgtgaagcggatcgccattagaaccctggatgtgacaggcgaggccgtgaaactgatgggctaccctcctaagaaaatcttcgtcgagatggcccgcgacgtggacggcaagaatgagaaaaagaccaagcctagccggaaggacaaactgagcgagctgtacaagaatatcgacgaccgcgtgctggccgaagagtggaaggctaagctggacaacgagacaaacgacagcctgcggcgggacaagctgtttctgtactacagccagctgggcaagtgcatgtactccggcgagaagatcgacttcgagcagctcaacaacgacaatatctacgacatcgaccacatctaccctcagtccgtgaccaaggacgactccctcgagaatagagtgctcgtgcggcgcgagctgaatgagaacaagggcgacacataccccatctccagcgacatcagacggaagaactacgcccactggaaactgctgcacgataagaagctgatcggagacaagaagttcgccagactgaccagagatgaggaactgaccgatgaagaactcgccggcttcatcgagcggcagatcgtggaaaccagacagagcaccaaatacgtggccactctgttcaagcggctgtaccctgatagcgaggtggtgtacgtgaaggccggccatgtgtccgacttcagacacgacatggacatcgtgaaagtgcgcgacatcaacgacctgcatcatgcccaggacgcctacctgaatatcgtcgtgggcaacgtgtacaacgtgaagttcacccacgacgtcctgcggtacatcaagaacaaccggggcaagagagactacaacctcaaaaagctctttaagtactacaccgtgaccgaccggtccaccggcgagatagtttggaaatctggcgaaggcggcacaatcgccgacgtgaaaaaacagctggaaagcttcaacatccagtgcaccagattcgccgtgaccggcaagggcaaactgttcgacgtgcagcccattcctaagcacaagtgcggagaaggggtgcagatccctctgaaagagaacgacagcagactgtccgacgtgaccagatacggcggctacaacaaagtgaagatcgcctacttcttctgcgtcgagcacacagagaagaagaagagaatccggaccatcgaagtgatgcccatctacctggctgacagagtgggagaagatggcctgctggactactgcatcgatagcctgggactgatcgagcctaagatcatcgtcaagaagatcaagctctacagcctcgtgaagatcaacggctacttctactacctgtccggcaagcagaacgaccggttcctgatgtacaatgccgtgcagctgtgcgtggacaagcagagcagcgagtatatcaagaaactcgtcaagacacggaagatcctcagcgaggacaaagaatacgacgtggccgagcagaagattaactacgacgagaacatggccctgtacgacctgtttgtggaaaagcagaagtctggcatctactccaagcggatcaacaacgccctcaagatcatggaaaacggcagagtcagatttgccgagctgtccctgagcaaccagtgcatccagctggttaatctgctgggcctgtttaccggcggagcctgtaatggcgtgaacacagagctgattggcggccagagcaagggaaacaagatcaccacctccaaagtgatcagcaacaatatcgagttcaagctcatctatcagagccccaccggaatctaccagaccgtgattgacctgctgggagagagcggatcc

SEQ ID NO: 291 - DNA, 4035 bp, synthetic construct
  misc_feature 1..4035: note = Synthetic sequence or unknown origin
  source 1..4035: mol_type = other DNA
ggtaccgagaagaagaagcagttcggcaagtactacatcggcctggacatcggcacagattctatcggctgggccgtgaccgacaccaactacgagctgcagaagttcaaccagaaatccatgtggggcagcagactgttccctgaggctcagacagccgtggatcggagagtgaatagagtggcccgcagaagaatccagcggagaaatcagagactggccctgctgcaggacctgttcaaggacgaagtgtgcaagaacgaccctcagttcttcgccagactgagcgagtctatgctgcacgccgaggataagaccgtcggcggcaagaatagcctgttcggcgacagcgtgatcgacgacaaggcctaccacaagaagtaccccaccatctaccacctgagaagcgagctgatccacagcgacaaacctcacgatgtgcggctggtgtatctggccatccaccacatcatgaagtaccggggccacttcctgttcgagggcagcctggataccgagagcaccttcgacaatattatgaagtccttctgcgaggaagtcgaggactccctgggcatcccttttgactgtagcgagctgcccgtgatcaaagaggtgctctgcaacagaggcatcacccggacagagaagcagaagaagctgttttccctgttcgactgcaagagcaacagccagacagctgccctgctgaagatgatcaacggcagcgtggtcaagctgaaggacgtgttccctgtgggcgaagagtccgaggaagagatcaagatcgagttcggcagcgacagctacgaccagctgatccctaaactggaagtgctgctggccgacgactacagcatcctgtctaaggccaaggccattcacgactgggctctgctggaaggcatcctgcacggcaaagagtacctgagcgacgccaagaaggacatctacgatcagcacgccaaggacctgcggctgctgaaaaagctgatcagacggtactgccccaacgagtacgacagcctgtttaaggaccccagcgacgacagaaactactgcgcctatgtgggcgtcgccaaagtgaagggcaagaaagtgcctgtggtcaagagctgtacccaggccgacttctgcaagagagtgaagtctaccctggaaaagatcaaggccgacgatcccgagctggaagaagccagagctagactgagcagcgagaacttcatgcccaagctgcggaccaaggacaacagcgtggtgcctaaccagctgcacctgaaagagctgaagaagatcctgcagaacgccgagaagtacctgcctttcctgaagtccgccgatcaggatggcaccaccgtggaagagaaaattctgcagatcctgaccttcagaatcccctactacgtgggccctctgaacgacagagatcccaaggctcagaatacctgggtcgtgcggagaagccacgagaaaatctacccctggaacttcgacgagatcgtggacagagagatgagcgccgctgccttcatcaccagaatgacagcccagtgcacctacctgaacgaccacaccgttctgcctcagaacagcctgctgtacacccggttcatggtgctgaacgaactgaacaacctgaagatcgacggcgagcccatcagcgtgtccctgaagcaggatatctaccgggactgcttcgagacacacagcaaggtgtccatgaacgtgctgctgaagtatctgaaaacccggggcatgctgatcgagaaggaccaagtgacaggcatcgatggcgacttcaagggctccctgaaagtgtggcgcgagatgagagatctgctgggcgattgcttcaccatcgagatcgccgaagagatcgtgcggctgtctacactgctgggagaagatcggaagatgttctgcgagaagctgaggaaagagttccggcaagagctgcctgaggaagtgatcatcagagccagcggcaagagatacacaggctggggcagactgtccaaagagtttctgacctgcatccacgacgaccactacgaccctgagacagccgagtatcccaacatcatcacagccctgtgggagagcaacgagaacctgatgcagctgctcggcggatctcatggatttgccgaagccgtgcggaagtacaacgagacaaacagccaggactacggcttcagctaccagaccgtgaaggacctgtatctgagcccttctatcaggcggagcgtgtggcagaccctgcggatcgtgaaagagatcaggggcattaccggacacgaccccgagaaggtgttcgtggaaatggctagaggcggcggagagaagaacaagcggacacagagcagaaagagcaagctgctggaactgtaccggtcctgcaaggacgagacaagagactggatgctcgagctgaatgccagagaggactccgactacagaagcgaccggctgtacctgtactacacccagatgggcagatgcatgtacaccggcgagagcatcgacctggatcacctgttcgatgccaacgtgtacgatgtggatcacatcttcccacagagcaaagtgaaagacgacagcatcgacaaccgggtgctcgtgaagagagtggtcaacgccgaaaagaccgacgtgtaccccatcgacaagaaaatccggaacaacatgcacagcacctggtccatgctgctgcagaaaggcttcatcagcaagaagaagtacgatcggctgctgcggggcaccaagctgacagatgatgagctgagcgacttcgtgtcccggcagctggtggaaaccagacagtctacaaaggccgtggccgatatcctgggacatctgctgcctgacacagaggtggtgtacgtgaaggccagcctggtgtccgacttccggaaagagtacgacctgctgaaatgccgggaagtgaacgatctgcaccacggcaaggacgcctatctgaacatcgtcgtgggcaatgtgtacaacaccaagttcacaaaggacccgcggaacttcttcagagagcaggaccacacctacagcctgaacaagatgtatcagttccccgtgcggaggggcgaaacagttgcttggcaacctggcgagagcggcagcatcacagtgatcaagagcatgatgcgcaagaacaacgtgctggtcactcagatggtggtggaaaagaagggccagctgttcgacctgaatcctgtgcggaagaaccactggcagctcccactgaagaaaggcatggcttgcctggccgatccttctaagtacggcggctacaacaacgtgaagggcgcctactttatgatggtcgagtccatcgagaaaggcaaggccagacggtccatcgtggatatgcctattcacctggccggcatcgatcccgaagatccagccgtgatcgagatgctcgtcagagacaagggcctgaacgagcccagaatcctggtgcctcacatcggcatcaacagcatcatcgagattgacggctgccggatgtacctgaccggcagaacaggcaccaacctggattatgccctggctcaccagctcatcctgggctacgagaatgagctgtatctgcggaatatcctgaagtactgcgaccgcgacatggaatactctcacacccaccggaacgaggaactgaagatcagcgagtacgatggcctgagcgccgaggaaaacctgaagctgtacgatctgttcgtgtccaagctggaaaacaccgtgtacagagtgcgcctgtctgcccaggctgagaatctgaaaaaggccagaggcagatttgaggaactgtccgtggaaaagcagtgcaagtgcctgaaacaggccctgaacctgttcacctgtaacaaagttaaggccgacctgagcatcattggcctgggctctcagctgggctctatcagaaccgccagatgcatcagcaattacgagtccgtgtggatgatcaatcagtccgtgaccggcctgtttgagagcagaagcaacctgctgagcggatcc

SEQ ID NO: 292 - DNA, 4038 bp, synthetic construct
  misc_feature 1..4038: note = Synthetic sequence or unknown origin
  source 1..4038: mol_type = other DNA
ggtaccaccaagttcaacaaggactactacgtcggcctggacgtgggcacagattcttgtggatgggccgtgaccgacaccgactacaatctggttaagacagccggccacgacttctggggcagctacatgtttgagaatgcccagaccgccgaggaacggcggctgaatagaacagctcggagaagaacagcccgggtgcacgaaagactgatgctgctgcaagagctgttcgccgacgagatctgcaaggccgatcctctgttctttatccggatcaacaacagccagctgttcatcggcgacaaggacaaagccctgagcagcgccaacatcctgttcgacgacaagcactactccgacaaggattacttctacgagtacaagaccatctaccatctgcggagcgagctgatcgacaaccccgtgacagacatcagactgctgtatctggccgtgcaccacatcgtgaagaaccggggccactttctgttcgagggccagaccttcgacgtgaacgacagaaagaacgtgctgaccaagttcgaggaaatcaacaactacctgagcgacaacgacatgcccgtgctggaactgaccaacatcaacgaggtgctggactgcatcaaggacaacaacctgggcaagaaggccaagaccaccaagctgaaagaactgttcggcatcaccaaggacaagcagcagctggccatcatcaatgccctgagcggctgcaacttcagcgtgaacaacctgtactgcaccgacgaggactacgagatcgagaagatcagcttcgacgactccctgtacgacgataagttcctgaagattgagaacgaagtgggcgccgacaacgccgtgctggtgtctaatctgaaggccatctacgactgggccatcctgagcaacatcgtgggcgacagcaagttcatcagccaggccaaagtgaagatctacgaggaacacaagagcgacctggcctacctgaaaacctacatccggaacaactacgacatcgacacctaccgcaagatcttcagataccacaagggcatccccaactacagcgcctacatcggcatggataagcagaaaggctacagcaagtgcagcaagaccgacttctacgcctttctgaagaacaccatcaagatcaacgacgactacatcctgaagaagatcgaggacggcaacttcctgcctaaacaggtgtccagcgccaatggcgtgatcccctaccagctgaattatgccgagctgaaggctatcctgaacaacgccgagaagtactttccattcctgtccaaagagcaggacggcctgaccgtgtctcagaaaatcctgatgctgatgcggttcaagatcccttactacgtgggccctctgaacgacaacaacaagaagttcgcctgggtcaagaaatacgacggcatgcagaacatcaagattacgccctggaacttcgacaagatcgtggacctggatggcagcgaggacgccttcatccggaagatgaccaacaagtgcacctatatccagaccgaggacgtgctgcctgccaatagcctgctgtactcccagttcgccttcctgaacgagctgaacaatctgaaaatcaacggcgtgaaggacatgcgggccagagacatcatcttcgagtacgccaagagccacaagaaagtgaccctgaaggcctgcctgaacctgctgcagaagaatgccatcatctccaacaactccaccaccgacatcttcagcggcaccgacggcgatttcaagtgcagtctggcccctttcgtggatctgaagtttctgggcgacaagctgtacaccaagcctcagatgtgcgaagagatcatcctgtggatcaccctgatcagcgataaggaccggctggccaagcggatcaaagagaagtacggcaagtacctgaccgaggaagagattaagaagctgaagggcctgaactacacaaagtggggcagactgagcaagaaactgctgtgcgagatcaagagcccctactgtgtggacgagaatggcgagtgcctgagcatcattcaggccatgtttgccaccggcgagaacttcatgcagctgctgagcggcaaatacggcttcgccgacagcatcaaagagtacaacgagagcatctcccagagcaccgccgtgacctacaagaccgtgaaagagctgtactgtagccccagcgtgaagagagccatttggagaagcctggacatcgtcaaagagattgaaaagatcatcggcaagccgccgaagaaaatcttcatcgagatggccagagaggtggacgacaagtctaagaagggcaagagaaccaccagccggaaagagcagatcaagctgctgtacaaggacatcaaggataacgagcgcgactggaaagaagagatcgaagagacagtggactccaagtttaactccgataagctggtgctgtactacatgcagaaagggatctgtatgtacaccggcaagcccatcaggctgcaggacgtgttcaacaccaacatctgcgacatcgatcacatctaccctcagtccaagatcaaggatgactccctggacaaccgggtgctcgtgtacaagacagagaacagcgccaagaacgacgtgtaccccatcagcagcgagatcagacggaacatgagcgcctattggaaagaactcctgaagggcgacttcatcagcgagaagaagtacgcccggctgatcagaaacacccctctgaccatcgaggaatgcaccgatttcatcaaccggcagctggtggaaacccggcagtctacaaagtgtctggcccagatcctgcggcagtacttcggagataagtgcgaggtggtgtactccaaggccggcaacgtggacagattcaagcaggataacaagatcattaagatccgcgagctgaatgacctgcaccacgccaaggacgcctatctgaacatcgtcgtgggcaacgtgtacaacacaaagttcaaccacgacgccagcgtgtacttcaagaagaatgacgtcaacagctacaacttcaccaagctctacgagaaggatatcgaaggcgcctggaaggtcgacgaccggcagagaatcatcgataccgtgaacaagaatacctgccggatcgtgcggatgacagagtctggaaaaggcgccctgttcaacgtgaaccccgtgtctcctaatggccaagaggccgacaaactgcagaactggattccccggaagctgcggctgaccaataccgacaataccgccattgccgatgtggctaagtacggcggctacacaggcatcaacaccgcctactatatgctggtcaagagcgtggacaagaaggactacaagctgagcttcgtggcctatccactgtacctcgagaagctgtataacggcgccctcgagaacaagctgaagtactgtctggaagccttcgacctcaaagaaccccagatcgtcctggattacatcaagaagtacagcctgatcaacgtcaacggcaactactactacctcgtcggaggcgccacaccaaccgtgaagtccgtcgagtttaacaacgcttaccagctgtacctggaaaacaaagagatgcagatcctgaagctggtcctgaagtccctggataagaacgactccaagaatatcaacaaagtgatcgtgaacgagaatgtgaacaaggacgacaacatccagctctacaagacgttcgtgaacaaactgagcctgaacgtctactgcaagatccccaatatccagaacgtgatcaagtccctgaacgatgaggaaaacaccttcgagcagatggacctgaagaaacagtgcatcgtgctgagccagatgctgaatatcctgtgcggcagagccgctgatctgagcctgctgggaatcaagtccgtgtccgagcggatcagattcaccgtgtccaagcaggacaatattaagatcatctatcagagccccaccggctaccaccggaagattatcaatgtgaaggacctgctgggatcc

SEQ ID NO: 293 - DNA, 4041 bp, synthetic construct
  misc_feature 1..4041: note = Synthetic sequence or unknown origin
  source 1..4041: mol_type = other DNA
ggtaccgagaacaacaagaagtacaacatcggcctggacatcggcaccacatctgttggatgggccgtcgtggaatgcgagaaccagaagatcatccggaagggcaacaaggccctgtggggcgtcagactgtttgaggaagccaacacagccgccgacagacggaacaagagaagcaccagaagaagatacgaccggcggagagagcggatcagactgctgcaagaagagttcaaagaggaaatcaacaagatcgacagcaacttcttcaccaagctgaaagagagcttctaccacgaggacgacaaagagaacaagacgatccctctgaccaaagaagagaaagagacaatcaaagagtacaacaacaagtataagaccatctaccacctccggaacaagctgatcaacagcaccgagaaagaggacatccggctggtctatctggccatccaccacatcatcaagtaccggggcaacttcctgtacaacagcgacaacttcagcgtcgagaacctgaacctggaaacccagatcgagacaatcctgaacagcgccatcaatttctgccccagcctggaatgccccaccgactacaaagagtatatcaagatcaacgacctgtctatcgccctgctggacagcagcaagaacgaccggaaagtgaaggtgcagaagatcctggaatccatcctgcctaagatcttcgtgtccgagttcatcaagctcatcaacggcaacaagttcaatatcatcaagatgatcggcctcgagaacatcgacaagctcgagatcagcttcaacggcaccgattacgaggaaaagtacaacgaactcgagagcatcctgggcgacagcatcgaggtgctggatagcatgaagcagctgtacgatatggtgttcctgaagcggctgttcaagagcagcgagagcaccaacatcagcgccctgatggtcgagaagtacgagctgcacaagaaggacctgaagttcctcaagtccatcctggatatcgaccggaagatctataacaagatcttcaagagccggaaagagatctgcccctacgagaactacatcaagaacaagatcaccaacgaagagttcgtgaaagagattaagaagtacctgccgagcatcttcgagaagaacatcaatcaagagctgctgacctactacgaggccaacatccagaaacggatggaaaacggcgacttcctgcctcggatcaccgacaaggacaacggcaagtacccctaccagctcaacaaagaagaactgatcaagattatcgagaatcagggcaagtactacccgttcctgctggataagaccaaggacgacacctacaagctggtcaagctgctcgagttcagaatcccctactacgtgggacccctgaccgaggaaagccacagcaagttcgcctggatgatccggaagaactacaacgagaagatcacgccctacaacttcgacgacatcattgacaaagaggccaccgccgagaagtttatcaagcggatgatcagccactgcacctacctgctggaagaacccgccatgcctaacaacagcatcctgtacagcaagtacaaagtgatgaacgagctgaagcagatccgcatcaacgggaagaaaatgagctgcgacatgcagaacaaaatcctgcggaacctgttcatgaccaccagcggcaacatcaccgataagaagtttaaagagtacctgtacgccaacaaggacttcgacatgtaccagggcgacttcaacattaccggctacagcgccgacggcaagtttgccaacaccatgcagagctacatcgatttcttcggcgagaacggcatcttctccaacaccaactacaccctggaagaggccgagcagatcatcgagtggatcaccatctttgaggataaggacatcctcaagacaaaggtcgagcgggactaccctctgctgaacgacagccagatcaagaagattatcagcaagaagtatagcggctggggctccctgtgcaagaaactgctgaccaccaagtactatgtggacaaagaaagcggcgtgaccaagagcatcatcgacctgatggaagagacagagaacaacttcatgcagatcattaacgatgacacgtacaacttccagaagatgatcaaagaaaacaacaaaattgacgtgacccagaagctgaactacagcgttgtggaatgcctggccacctctcctagcaccaagagaggaatctatcaggccctgagagtggtggacgagatcgtgaagtacatgaagaaagaacccgaggccatcatggtggaaatggccagaggcgacgatcagaagaagcggaaggacgatcggaaaaagtacctgatcaagctctacgagaaggctaaagaagaaattgaggactacaaccagctgatgcagcagctcggcaagttcgaaaagatcgactctcagaagctgttcctgtacttcatccaagagggcaagagcctgtactccggcaagcccctgaatatcgaggacctggccacatacgagatcgatcacatcatccccagaacgctgatcaaggacgatagcatcgacaacaaagccctggtgtacagagaggaaaaccagaccaaggccgccaactacattctgcccagagagttccgcagccagttcaacagagcttggtgggagcacctgaggaagatcggcctgatcagctccaagaagttccacaacctgattcggagcgagtacaaagaagaggaaattgagaacttcatcaaccggcagctggtggaaacccggcagattaccaagcacgtggccaatatcctgaactcctactacaagaacacccaggtggtgtacctgcacgccgacctgagccacaactacagagagaagtttgagctgtttaagttccgggacatcaacgactaccatcacgcccatgatgcctacctggctgccgtgcttggagagtacaaagaaaagtacctgaagtgcaaagtgaacttcgagatgctcaaagagctgaacaagtccctgatcgagcagaaggattacaaaaagctgaagtacggctacgtgatcaactccctggacagctccatgaacgacgtgatgaaggaagtggtgtccatccactttgacgagaaaaccggcgaagtgctgttcgacgccgaagagtttaaccgcagagtggaagataccctgtaccggaacgacatcctgatctccagaaagcccgagatcaagaccggccagctgtacaaagagactatctacagccacaacgatgccaagatcaagagcgggatcaagatctctaagaccctgcctgtcgagaaatacggcttctacaccaatatcgagtacagctacctggtgctggtcaaagtgaaagaaaagaattacatgttcggcatccccattatgtacgataacaaaatcgacaaggccaagtatatcgaagagaagctcaaggtgtccattgacgactacgagatcatctgcgaccggattccattctacacaaagatcaactaccacggccacctggcctacctgaccggctccattgagttttggaacgcctatcagctgaagatcagcaaaaagtctatgaagaaatggaagtatatgctgaacttcgccctcaacgacaagaagatccccgtcatcgacaatcaagaagtgctcacagagcaagaggtcaacaagcagatgcttgagttcattaagtatctgctgagcctgcacgagctgttccctctgtataacaacacctttaagaagctggaaaagattgacattgagaacctcgacatggaaaagaaaaagatcctcatcaaagaactgctgaagatgctgagcgcctccagcatgaacgctaacctgaaagagttcggcctgaccgacagagaaggccgggtgcacaagtctaatatcggcgagggcaccctgatctacaactccatcaccggcatccgggaaaagaccatcgtgatcgaaggcaagcggaagggatcc

SEQ ID NO: 294 - DNA, 4047 bp, synthetic construct
  misc_feature 1..4047: note = Synthetic sequence or unknown origin
  source 1..4047: mol_type = other DNA
ggtaccgagaaggactactacctgggcctcgatctcggcacaggatctgttggatgggccgtgaccaacgccaactatgaagtgctgagagcccacggaaaagccctgtggggcgtcagactgttcgatacagccaacaccgccgaggaacggcggatctttagaaccagcagacggcggctggaccggcggaatagaagaattgagctgctgcaagagctgttcagcgaggaaatcaaccagatcgacgccggcttctacctgcggatgaaggaatccaagtacatgcccgaggacaagcgggacagcaatggcgaatgtcctcagctgccctacgctctgttcatcgacaaggacttcaacgataaggactaccacaagcagttccccaccatctaccacctgagatactggctgatgaccaccgaggaaacccctgacatcagactggtgtatctggccctgcaccacatgatgaagcaccggggacattttctgctgagcggcgacatcgagagcgtcagagagttcaagaacaccttcagccagttcatccagtgcctgcaggacgaggaactggacttcaatctggaaatcagcgacgacaaatacgtgatgatcgagaacctgctgaagaaccacaccatgaccaagagcgccaagaaaacccagctgatcaagctgctgggcgctcacacaccttgtgaaaaggccgtgctgaacatgatcagcggcggcacagtgaagctgagcgatctgtttaccgacgccgagtacgacaacctggaaagaagcaagctgagcttcagcgagagcacctacgacgattacagcggcaccctggaaagcgacctggaagaacacttcatcgtgattgagaaggccaagatggtgtacgattggagcgtgctggtggacatcctgggcgattaccagagcatcagcgaggccaaaatcgccatctacgagaagcacaagaaggacctcgagtacctgaagaagctggtcaaagagaagttcgacgccaagcggtacagagacatcttcgtgatcaccgacgagaaaaccgccaactactgcgcctacatcggcatgacaaagaagaacggcaagaagatcgccctggaaggcaagcagtgcagcaagagcgacttctaccagtacctgcgcaagaacgtgctgaatgagctgggcgacgatgccgacgctcagtatctgaagaacgagctggacaaagaaaccttcctgcctaagcaagtgaccaaggacaacagcgtgatcccctaccaggtccacctgtacgagctgaaccagatcctggacaatctgagccccagactgcccatcctgcagaaaaccggcgagaagatccggcagatcttcaccttcagaatcccttactacgtgggccctctgaacggcatcacacagaacggccagagaacaaactgggccgtgcggaagaataccgagaatggcaaggccgagaaaatctacccctggaacttcgacgaagtgatcgacattgaggccagcgccgagcagttcatcagacggatgaccaacaagtgcacctacctgatccacgaggacgtgctgcctaagtactccctgctgtactctaaatacgtggtgctgaacgaactgaacaacctgagactggacggcgagcctatcgacgtggccctgaagcaagagatctacaacaacgtgttcgagaagtaccggaaagtgacccagaagaagctcaaggattacctcgttagagagggccacctgagcagagagaaggccgccaaactggacatcaccggcatcgatggcgacttcaagggcagcctgacagcctaccacgactttaaagagaagctgaccggctgcaacctgagccagaccgacaaagagaacatcatcctgaacatcaccctgttcggagaggacaagaagctgctgaaacagagactgagcgccctgtatcctcagttcaccgacaagcagaaagccgctctgtgcagcctgcagtattctggctggggcagactgagcaagaccttcctggaagggattgccgctcctgctcctgaaacaggcgaggcctggaccatcatcagaaccatgtgggagacaaacgataacctgatgcaggtcctgagcgagaagtatcagttcgccgaggccatcgaggccgaaaacggaaagaatgagatccagggcatcagctacgagctggtggaacagctgtatgtgtcccctagcgtgaagagacagatctggcagaccctgcagatcgtgaaagaactgtgcaaagtgatggaaaagccgcctaagcggatcttcgtggaaatggccagggaaaaagccgagagcaagcggaccgagtccagaaagaaggtgctgatcgacctgtacaagaagtgcaaggacgaagagagaacctggatcgaagaactgagcaacacccaggacacccggttcagaagcgacaagctgtacctgtactacacccagaaaggccggtgcatgtacagcggagagcccatcgaactggaaaacctgtgggacaacaaccagtacgacatcgaccacatctaccctcagagcaaagtcatggacgacagcctggacaaccgggtgctcgtgaagaaaacctacaacgccgaaaagaccgacgtgtaccccatccgggccgacatcagagaaaagatgaaggccttttggaagtccctgctggctggcggcttcatcagcaaagaaaagtacaaccggctgatccggtccaacgagttcgagccttctgagctggccggctttatccagagacagctggtcgagacaagacagtctaccaaggccgtggccagcatcctgaagcagattctgcctgacaccgagatcgtgtacgtgaaagccaagatcgtgtccaacttccggcaggacttccagctgcctaaagtgcgcgagatgaatgatctgcaccacgccaaggacgcctacctgaatgtggtcgtgggcaacgcctactacaccaagttcaccaaggatgccgtgtggttcatccggcacaaccccggcagaacctacaatctgaagagaatgttcaccagctgcgatatcgagcggaacggcgaaacagcttggaaggccggcgaaaacggcaccatctgcatcgtgaaaaagaccatgaacaagaacaacatcctcgtgacccggcggagctacgaagtgaaaggcggactgtttgatcagcaactgatgaagaaaggcaaaggccaggtgccaatcaagggcaacgacgagagactgaagatcgagaaatacggcggctacaacaaggccaccggcacctactttatgctggttgagagcgaggataagaaggggaacaagatcaggaccatcgagttcgtgcccctgtatctgagcagcgagatcgaagccaacgacagctatgccgtgcgctacctcatgcaggacagagagctgcggaaccccaagatcctgctgccaaagatcaagatcgactccctgttcaaggtggacggcttttacatgtggctgtctggcagaaccggcaaccagctgattttcaagggcgccaaccagctcatcctgagcgctaaagatgccggcgtgctgaaaaaagtgctgaagttcgtgtctcggcagaaagaaaacaagaacctgaagctggtggccttcgacgagcttgataccgccgatctgatcggactgtacgacacctttctggataagatccagaacaccgtgtacggcatccggctgaaggcccaagagagcaccctgatcgaaaagcgggaagagttctgcgacctgaccgatgaggacaagtgcatcgtgctgtccgagatcctgcacatgttccagtgtcagtctggcgccgcagatctgaagctgattcatggacctggacacgctggcgtcctggtcctgaacaacaacatcaccaagtgcaagcagatcagcatcatcaatcagagccctaccggcatctacgaacaagagatcgacctcatgaagctgggatcc

SEQ ID NO: 295 - DNA, 4050 bp, synthetic construct
  misc_feature 1..4050: note = Synthetic sequence or unknown origin
  source 1..4050: mol_type = other DNA
ggtaccaagagctacatgcagacagccccttactatatcgccctggacgtgggcacaaattctgttggatgggccgccaccgacaaagagtacaacctgctgagattcaagggcaacagcatgtggggcgtcagactgtttgatgagggccagaccgccgaggaaagacggatcagcagaaccaccagacggcggctgaacagacggaagcagagactgaataccctgtacctgctgttcaaagaggaactggacaagatcgaccccgacttcgacaagcggatgaaggaaagctacctgatcaacgccgacaagaccaccggcaccagattcagcctgttcgccgatcctgactacaccgacaaggatttcgcccgcgagtacaagaccatgtaccacctgagacaagagctggtcaagagcgagaagccccacgacgtccgatgtgtgtatctgggagtgcaccacatcctgaagtccagaggccacttcctgttcgaagtgggcgagaacgccgaagagaacagatccttcgccgaggtgttcgacgagtacctgatcgccatcagagacaacctcggcgtggactgttccgtgtctgatgtgtccgaggtgcacaacatcgtgtccgataagaccatgaagcaggccgagaagatcaagggaatcgtgtccctgatcagcgtggccctggatgagctgaccgaggaaaaagagctgaagaagcagatcgaggccttcgccaagctgatcgtgggagccaacgtggacctgaagaatatgttcggcgacgacaccctgaagggcagcttcaaagtgacagccgacgtggaaggcgacgataagttcaaggacctgagcgacaagcagctgtctgtgatcgccgctgccaagagcgtgtacgaccagatcaagctggaagagatcatgggcagcagcaactacatcagcgactacatggtgtctaagtacgaggaacaccggaaggacatcaaggccctgaaagagttcctgaaaagcaagggcagaatcgacctgtacaagagaatcttcagcgagcggaccaagggcctgaacaattatgccgcctacgtgggctacgagggccaagagtctaattgcaccgccgagaacctgaaggacttcctcaagaaagaactgcaagagtataagtctgagatccccgccatctacgataagatcaccgagggcaagttcgcccctaagctgagaaccaccgataacggcgccattcctagcagcctgcacaaaaaagaactcgtgaagatcctggaaaacgccagcgcctacctgcctttcctgaactctaaggatgccgacggcctgagcgtgaaggacaagattatctccctgttcgacttcaagatcccctactacgtgggacccctgaacaacagcagcgacaagtactggatcgtgcggtccaacgagaagattaccccttggaacttcgaccgggtcgtgaactgcgaggaaaccgccaaagagttcatcctgagaatgaccggcaagtgcacctacaccggggatgatgctctgcctctggatagcctgctgtaccgcgagtataccgtgctgaacgagatcaacgtgatcaagatcaacggcaagcccatcagcaagcgcatcaaggatatcatctacaacgacctgttcgtgaagtcctccaagaaagtgaccaagaaggccatccacacacacctggtcaacctgggcgagatcaccaaggatgatgagatcaccggcgtggccgatacactgacaacaagcctgcagagctaccacaagctgcggagaaccatcgagaagggctacagctccgagctgattgaggaactgatcaagagcatcgtgctgttcgcccaggacaagaaactgctcaagaagtggatcaaagaaaagatgcccgacgccagcgacgaggatatcaagtacctgtccagcctgaagttcagcggctggggctctctgagcaagaccctgctgtgcgacatcatgggaaacctgaacaccgagacaggcgaagtgatgagcgtgatcgacgtgatgagagagaacagcgagaatctgaaccaggtgctgtacaactacggcttcgagaaggccgctaaagagtaccgggaaaacaaatacggcagccaggacaaaatcagcgacatcctggacagcatgtacatcagccccaaagtgcggcggagcatcagacaggccatgaagatcgtggacgagattatcggcatcaagaaggctgcccctgagaagattttcatcgagatggccagagatgtggacggcaccaacaagaaagagcagaccaagtccagaaaagagcagctgatcgagctgtataaggcctgcgaagaggactctgccaagctgctggaagtgtgcggagaggaaggcatcgagagattcaaagaactgtacaacaacctcgagaacatcgaggacagcaagctgagacaggacaagctgtacctgtactacacccagttcggccggtgcatgtactccgacgagtttatccctctggacgagctgcaggataagaacaagtgggacatcgaccacatcttccccagaagccggatcaaggacgacagcctgagcaacagagtgctcgtgaaggcccagctgaaccggtccaagaccaacgagtaccccatcaaccaggacatccgggacaagatgagagacaagtggctggtgctgaagaacaagaagatgatcaacgacaccaagtacagccggctcgtgcggagcgaacctctgacaacagatgagctgtccgccttcatcaaccggcagattgtggaaacccagcagagcacaaaggccctggccacaatcctgggcaagagatgccctgacagcaagatcgtgtacagcaaggccggcaacgtgtccgacttcagaaagtactacgcctacagaagcgaggaaccctacaccgagttcatcaagtgccgggacctgaacgatctgcaccacgccaaggatgcctacctgaacatcgtcgtgggcaacctgtacgataccaagtttaccgccgagtttttcaagaacatccacaacgaggaatactccctcaacaccgaggccatgctgagctggcctgtgaaaggcgcctggattcccgagagcaaggataagacccagggcaccatcctgaccgtgcggaaaaccatgggcaagaacaacatcctgtacaccagaatgcccagagaggaacacggcaagctgttcaacctgacaatcctgaagaaagagaaggactccaacagcggcatgcccgtgaagaaggatcggagcatcgagaactacgggaagtatgacaagatcaaaggggcctacttcgccctggtggaacacaccgagaagaagaagagagtccgcagcctggaacctatcttcatctgtgacaagaccgagtacgagaaggacaataccgccttcttcgagtccaagggctttaaggaccccagagtgatcgtgcccaagatccacatggacagcgtgctggaactgaacggcgtgcggtacaacatcaaggggagaagcgacgacaacatcatctacggccacatgtgccagctggtgctcgattctagagccgtgaccgtgatccggaacaccacaaagtacctgcagcggatgagcaagcagaaggataagaaagagcccaccagatacgacggcatcacagccgaggacaacatctacctgatgggatgcctgatcgacaagattgacaaagtcaaggactacaacaagtccatcaaatgctcccggatcatcctcgaggccgaaaagaagaactttgagaacggcagctacaccctgtacgagcagtgcgtgtccatctccaaggctctgatcggcttccggtgcaatcagagagtgtctggctacaacggcagcaccatccggatcaacaagaaggtgtcctctctgtcctccgcctacctcgtgaatcagagccctaccggcctgtatgagtataagattgacctgctgaaggacggatcc

SEQ ID NO: 296 - DNA, 4062 bp, synthetic construct
  misc_feature 1..4062: note = Synthetic sequence or unknown origin
  source 1..4062: mol_type = other DNA
ggtaccaacctgaaagagatcccctactacgtcggcctggattgtggcacatctagcgtgggctttgccgtgaccgacaagaactacaacctgctgaaggccaagaacaaggacatgtggggcagccacctgttcgacgaggccaatactgccgaggccagaagaatccagcggaacgccagaaaaagactggccagacggaacgagcggatcaagctgctgcagagcatcttcgccgaggaaatcgccaagatcgaccccaccttcttcatccggctgaacgagagcagcctgtaccaagaggacagaagcaaggacaacgaccagcctttcagcctgttcaacgacaaggattacaccgacaaggacttcaagatcgatttccccaccatctaccacctgagagccgctctgctggatggcagcatcaccaagaaagaccccagattcgtgtatctggccctgcaccacatcgtgaagaaccggggacattttctgttccctggcgagagcctggccagcatccagaatatcggaacaatcctgcaggccctgaaagaatgcagcagcagcatctttgaagaggacctgaccttcggcagccagaacctgattgaggacgccctgaagatcaagaagaaaaccgagcgcatcgagacactgaagtccctgatcttctccaacaacgataagcggaagctgctgatcatcaaggccattgccggctactccatccagcctaagaatctgttcgagaacgacgagtacgacgagctgcccaagctggaatttcagaagtccagcttcgaggaacaggacctgcctaaactggaagagacactgcaagaggacgagtacaagttcgtggaaagcctgaaggccctgtacgattggagcctgctggccaatatcatggccggcaaggatagcatcagcaaggccaaaatcgaccagtacaacaaaaacaagcaggacctcaccgtgctgaagaaagtgatccgcaagtacttcaccaaagaggaatacgaggcattcttccacagcaacaaagagggcagcttcagcaactacatcggctccatcaacagcaagcacctggccaagggacccgagcacaagaccagaaagagagtgaagcggaccaacaccgacgtgttctacgccgaagtgaaaaagaccctgaagaagatcaccgtcgaggacagcgacgtgaaccagatcctgagcgatatcgagaatgacaacttcctgcctctgctgcggagcttcagaaacggcgtggtgccctttcaagtgaacctggccgaactgaagggcatcctggaaaagagcgagggctacctgccttggctggaaaaaaaggacgaggatggcctgagcgccgaggacaagatcatctctatcatgaagttccggattccgtactacgtgggccctctggccgatcctagcaagaacagaaatgcctggctggcccggaaagagagcggaaggattctgccctggaacttcgagaaaaaggtggacgtgggcgagtccgccgagcggtttatcatgagaatgaccaacaagtgcacctatctgcccgaagaggacgtgatccctaagcagtccctgctgtaccagaatttcatggtgctcaacgagatcaacaacctcaagatcaacagcgaggacatcagcgtggaacagaagcagaccatctactacaagctgttccggaagggcaacgtgacccagaagaaaatcaagaacctggctatcaccgaaggctgggtgcagaagggcgacgatctgatcctgtccggcatcgacgataccattaaggccagcctgagcagctatatcgccttcgctccttacctggaaagcggcaagctgaaccagaacgaggtggaagatatcatccggtggctgaccctgtttagcgacggcggcgatattgccaagcggaagatcgagagcaccttcagcggaaagctgagcaaggacgacatcaaagccatctccagaatgaagttcagcggctggggcaacctgagcaagaagttcctgaccggcattgatgccatcgatcccgagacaggcgagtataagaacatcatcagactgctgtgggacaccaactacaatctgatggaaatcctgcacaaccccgagtgcggcattctggaacagctggggaacaaagagcccatcgacagcctgaactacagcatcctgggcgacctgagaatcagccccaaagtgaagagacagatctggcaggctctgcggattaccaaagaaatcgagcacatcatgggccacaagcctgagaaggtgttcatcgaggtggcccgctatgagggcgagaagggcaagcgcaccaagacaagaaaggaccagctgctcgagaagattaagaaggctaaggaccccgacgacaatgagatcctgaagtctctggaatccgaggacgtgtccatgatcaccaagcgggacagactgtacctgtactacacacagctgggcaagtgcatgtacagcggcgaggatatcgacctggacgacctgctgtccaagaagtacgacatcgaccacatctacccctacagcaagagcaacgacgactccctgacaaacaaagtgatcgtgaagtccgagctgaacaccgagaagcggaacgacttccccatcaaagaggacatccggatcaagatgaacaagttttggaagaagctcctcgagaaagagctgatctccagcgagaagtaccaccggctgaccagaaacaccagcctgtccgatgaggatctgaagggcttcatcaaccggcagatcgtggaaaccagccagtctacaaaggccctggccgagattctgaagcggtactttggcgaagagacaaagatcgtgtactccaaggccggcaacgtgtccgacttcagaaaggacttcgacctgccaaagagccggatcatcaaccacctccaccacgccaaggacgcctacctgaatatcgtcgtgggcaacaccctgtactgcaagtacaccagcgcctggtttctcaagaacgtgaacttcaacaacccctacaagtacaacgtggaaggcgcctggatcgccgactccaacaagacaatcagcctggtcaaggccaccatggacaagaataccgtgctgttcaccagacagcccgagatgagaaccggccagctgtttgacctgaatcctaaggccaagggctccgagaagggaatgatccctctgaagatgatccccaagctgaaagaacagctctccaagaacaccaacaaagaagagattatcaaggcctggaccgataagtacggcggctacaattctctggccgtgtctcattttgccctcgtgcggcacctcgaaaagaagaagcaggtctacaccttcgtgaagatcatcgtgatcagagcccaagagctgctggacaaagagaatctgctgaagtactgcgtggaagaactgggctacaaggacgtggaaatcatccggaccaaggtgctgtttaacaccctgctgagcgtggacgacttcctgatgaccatcaccaacagcatgaacaagggcgccacactgggcaacgagagcgccattcctctgatcctcgaaaacaaatacgtgaaatacgtcaagaagctggaaaagttcaccaacgccaagcggctggataagaacctgctcatcgacgagaagtatgacgagatcagccgggaagagaacatcgagctgtacgaactgctgctcaaaaagtgcaagctgtacatcatgcggaacagacccggcaacagcaccggaatcattgagaggggcgaagaggtgttcaccaatctgcctatcgagcagcagacccagacactgatgaacatcctgaattacctgagcatgggcaacggctgcaccgactttagtctgattggcggcggaaaggccaacggcacactgacactgagcagcacaatcgacccctccaagaaaaaagtgtgcatcttcgaccagagcatcaccggcatctacgaggaacggctgaaactggaaggatcc

SEQ ID NO: 297 - DNA, 4068 bp, synthetic construct
  misc_feature 1..4068: note = Synthetic sequence or unknown origin
  source 1..4068: mol_type = other DNA
ggtaccgagaagtactacaatatcgccctggacctgggcaccaattctgttggatgggccgccatcggacccgactacaaggttgtgaagaagggcgataagcacctgtggggcgtcgtgctgtttgataagggcgagagcgccaaggacagacgggtgttcagaagcaccaggcggagattcgaccggcggagaaagagaatcgagctgctgagaatgctgatggccggcagcatcggcaaagaggaccctaccttcttcagacggctggacagcagcttcctgtgcaacaagaacaaggaccccaacagcacccggcagtaccactacaacatcttcaacgacacctacaccgacaagatctactacaagaagtaccccaccatctaccacctgagaaagaccctgatggaaagcgacgagaaggccgacatcagactgatctacctggccatccaccacatcatcaagtaccggggcaacttcctgcacgacgaggatgccattacaatcagcggagccggcgtgatcagcctgctggaagaaacctttagcgccctgaaaaccctgagcgacgacttcctgaatgccgacgccgaggccttctaccggattctgtctaacaagaacctgagcaagaaggaccggcagaaagaactgctgaccctgatcggcaacacccctctgagcaaagtgctggtgtctctgctgctgggctacaaagtgaagtccaacgagatcgtgtccgccttcagcctgagcctggatgaggattgcatcctgcagttcggcaccgacgataccgaagaacagctggccacactgagcaacctgctgaacgacgaccagatcgatttcctgaactgcacctacaagacctttttcgagaacaacttcatcgacatcctcggcgagggcaacgtgtacgtgtccgacctgatgatccagagatacgagaagcacaagcaggacctgaaactgctgaagaacgtgctggtgcagggcagcgacgagtacaaggccatgtttagaagccccagacaccagaaagagggcaagaagtccgacaaagagaacaagtcctccaacaagaaagtgaaggtgttcaactacgcctgctacgtcaagaccaacaccaagcagaccagataccagaatagctgcacccaagaagagttctacgactacgtgaaaaaggtgctgagcaagttcgaggacagcgccaacaagaccgccatcctgaatgagatcgagaagggcagcttcatgccccggatcaacgatatcaccaacgccgccattccttaccagttcaacaagaatgagctggtggccatcctggacaagcagggcaagtactaccccgagttctacaacaacaaggataagatcatctccctgctgaccttcaagcggccttactctgtgggagtgctgaagggcccctttagctggatcgaccagacaatcgacggcacagtgtacccctgggacttcgagcagaaggtggactacgacattgccaacgccaatttcatcaagaagatgctcagcaaggacccgttcttcgacgatcagtacgtgctgcccaaggactccatcacctaccagaaatacgtggtcctgaacgagctgaacaacatccggatcaagggcaagcccctggacgtgacactgaagcagagactgttcgacgacctcgtgtgccagaaaaccaccgtgtccaaggccgatatcattaagttcatcaatgtgtactacaagggcgtgaacatcgtggccgacgacatcaagctgtccgacgacaagctgctggggagcatgagaaccctggtggactttaagaagatcctgggcaacgacttcaccgagaaggacatccctctgtacgataagatcgtcgagtctatcgccatcttcaatgatatcaaagtgcgccagaaagtgatcaacaacctgtttgagtacaagccctacctgcggaagtacaccgtgctgttcagcaagaaacggtactctaagtggggcagatacagctaccggacactggtggaagaactgagcgaggaaaccacacctcggagcatcctggatatcatgtaccagacacagtacaacatcaatgagatcctgtacgggaaagagttcggcttcatcggcagaaccgtgggcaagcaagagcacatcatccccaactacgagaacctgatcgacagcctgtacgccgacgccagcgtgaagaaaacagtgtggcaggcctacaaggtcgtgcgggaaatcatcgagatcatcggcaacgagcccgaccacatcttcgtggaaaccaccaaagaggatgacattaagaagaagaaggacagccggaagaagctgctcgactacctgtactccgccatccagacagacgtggccgagtacaacgctaccctgaaagagatcaaaaagcagaagtccaccgttgccgaggaactcttcagcaacgagaaagtgttcctgtacttcctccagatgggcagatgcatgtacagcggcaccagcctgtcactggatcacctgagcgagtacgaggtggaccacattatccccagaagcctggtcaagaacgacagcatcgacaacaaggtcctggtgctgaaacaagagaaccagagaaagaaagagctggccatctccttcgccgtgcggaagaaaatgcagcccttctgggccttcctgaaggccaacaaaatgatcagcggctacaagtacaacaacctcatgaaggacgagtataccgacaaggatgtggccggctttatcaacaggcagctggtggaaacaacccaggccaactcctgcttccagcaagtgattaagaccgcctttcctgaccggaccgactatgtgctgcctatcagagccggcctgagccgcgagttcagaaagaaaatggtggataaggaccctaagcagtacggctcctttatcaagatccgcagcctgaacgacttccaccacgccaaagatgcctatctggccgccgtgctgggcaccttcaccaccaagtattacagagcctggggcaacgatgaccggatcttcgccaccaagaaaatcatggaaaccatgcagagcgagaacgagttcaagaagctcctgagccagcggtacagcttcattctggatctgctggaaaacggcgactacgagcctaccaacagcgacggcgaacccattcctgtggacgtggccttcgagaatatctgcagacagatggactacaacgacatagccgtgttcaaagtgaaagagcggcaggccagcaacgccttctacaatatgaatcctctgaaggccggcgagggaaagctgcccctgaaatatgtgaaggacgccaacggcaacagcatcccactggaccctgctctgtatggcggatactctggcgagcaggatgcctacttcgtgtggatcagctacgacaagggcaaaaagcgggaaaccagactggaaggcatccccgctctgattgccacacaggccaagaccaatgaccaggccatcaacgactactttgtgtccctgaacctgaagaacttcagcgtggaaagcgtgcccgtgtacaagaaccagctgatcaagctgaacggccagctggtgtatatcgtggcctctggcgaagtggccaatgccacacaactggtggtggacaagaaataccacaagctcctcaagatcgccgagacaaagaagtacgccgagtccgatatcgcccagctgaatgaggacgccgtggaatttgtgacccagtacgtggaaaagctggaaaagtactacggcctgtacaagacgatcgccgaaaaagtgaccgagttcctgaccaccggcttcacctccatcgacctggacgataagctgacctacatcagcaatctgctggtggtcaccaagagcggctccagcagaatcaacatgcccaaagagtggaacggcggcagcgattggggcagactgagcggcaagaccatctacaagaaagacgtgcacctgtaccacagcagcatcaccggctactataagaagggatcc

SEQ ID NO: 298 - DNA, 4071 bp, synthetic construct
  misc_feature 1..4071: note = Synthetic sequence or unknown origin
  source 1..4071: mol_type = other DNA
ggtacctactacggcggcatcgatctgggcacatcttctgttggatgggccctgaccgacgtgaactacaacctgatccggcagaaaggcaaggacctgtggggcgtcagactgttcgatgaggccaataccagccaagagcggagaatccaccgggtgtcaagaaggcggagagccagagaagtggccagaatcggcatggtcaagagctactttgccgaggccattgaggccgtggatgccggcttttaccagcggctggaagagagcaagtaccacagagatgagaaggccagcgagtctaagtacgccatcttcgccgacgacgacttcaccgacaaagagtactaccagaagtaccccaccatctaccacctgagaaagaagctgctggaaagcgacgagacacaggacgtgcgactggtgtatctggccgtgctgaacctgttcaagaaccggggccacttcctgaacagctatatcgccgaggacggcaaagaggaaagcttcagcgagctgtactccgtgttctggaacagcatccccgaggaactggccatggtgttccccgaagtgatcgacgtgcagaaggtggaagagatcctgagcagcaaggtgtacagcagaacagtggccaccgagaagctggccgaagtgctgcaggtttccaagaccaacaacaagagcagctacgagatcgtgaagatgctgtgcggcctgagcggcaagctggccaatatctttgccaaagaggtgctgggcgaagtctacgagaacaagaacctggacttccggggcgacagctacgaagagatcatcggcggactgtctgagatcctgcctggcgagtacatcgacatgctggaatgtgccaaggccgtgcacgataagggcgtgctgggatctatcctgaaggactacacctacctgagccaggccagagtggccatctatgacaagcacgccgaggatctgcggagactgagagtggtggtcaagaaatactgccccgagtgctacgacgactacttccgcgtgatgagcatcgacaactacagcggctacatcggcagcgtgtgctctggcaaagagaagatcagaagaggcggccacgacgccaagaaagaggcctacaagagcttctggaagaaaaccaccgagctgctgagcaccatgcctgaggatgacgccgacgtgatgtatctgaagggcgagctgcagaaggacaccctgctgcctaagcaaaagaccaaagaaaacagcgtgatccccaaccaggtccacctgaaagagctgaagaagatcctgtccaacgtcgagggctacctgccttttctgaaggatgtggatgagagcggcctgaccgtgaaagagcggatcatccggctgtaccagtttcagatcccctactacgtgggccctctgcacatcaatgctggcgaagagggcaacaaatgggtcgtgcggaaagaaaacggcaaggtgctgccctggaacctggaagataaggtggacatggccgagacaagaaaggccttcatcgagagaatggtccgacactgtacctacctgtccggcaagaatgtgctgccaaagggcagcctgctgtacgagagattcatggtgctgaacgaactgaacaacgtgaaagtgaacggctgcaagctgcccctggaagtgaagcagcaggtctacgaagaactgttcgccaagggcaagaaagtgaccctgaaaacattctgcacctacctctacaactgcggcgtgatcgacaaagtggataccgagatgatcagcggaatcgacggcggcttcaatcacacactgaccagctacgcccggttctgctccgtgtttggcgacaagatgaagctgtacaagtaccagaagatggctgaggaactgatcttcaccgccaccgtgtactccaacgacaagaccctgatgaaggaactcattgccaagaagtacggcaaccccgaggacgaggtgtacatcagcaaagagcaagagaagaagattctgggcttcaagtggatggactggggcagactgagcaaagagttcctggaactgaagggctgctccaaagaggatggcatcgagatcagcctgattcaggccatgtgggagtgcgactgcaacctgatggaagccctgagcgacaagttcaccttcggcatcaaactgctggacatgaaggaaggcagagagaaactgctgagcgatttcacctacgaggacctgcaggacagctacctgagtgcccctgtgaagagaatgacctggcagaccatcctggtcctgaaagaactgtgccacgtgatgggagaagcccctggcaagctgttcgtggaaatgcctagaaccgagggcgagaagggcaaaagaaccgcctctagaaagcagcagctgatcgagctgtataagaagtgcaaagaagagagccacgactggatctccgagatcgacggctacaccgaggaccagctgcggagcaagaagctgtatctgtactacacccagcagggcagatgcatgtacaccggcaatgccatcagcctgggcgacctgctgtccaacaacggcagatacgacatcgaccacatctaccccagacacttcgtgaaggacgacagcctggaaaacaacctggtgctggtggaaaaagagtccaacgcctacaagtccgacacataccccatcgacgccgacaccagaaatgcccggtacagactgtggaagtccctgaaagacgacgatttcatcagcgaggaaaagtacaagcggctgaccagaagctgggagttctccgaagaagaactggccggcttcatcaaccggcagatcgtggaaacaggccaggccaccaaatgtgtggcccatctgctggaagaactgctgcctgagacagaggtggtgtacgtgaaggccggcaacgtgtccgactttcggagagagatgaacctgctgaaaacccgcagcgtgaacgagttccatcacgcccaggacgcctacctgaacatcgtcgtgggcaatgtgtacaacaccaagttcacaaagaaccccatcaacttcgtggtcaactacaagaaggacagcgccaagtaccgctaccacatgtgcaagatgttcgagtacgacgtgaagcgggatgccgtgatggcttggacagccggcgagaaaggatctatcgtgaccgtcaagaaaatgatgggcaagaacacccctctgctgaccaagagaacatacgaggcccacggcggaatcgccgatcagacactgtattccgccaaggtggccaacgccaacaactacatccctctgaaggccatggacgagcggatgggcgacgttaccaaatacggcggattttccagcgtgtccggcacctactactttctggtggaacacgagaagaaaaagaaggtcgtccggaccatcgagcagatgcccctgtatcttaaggatgccctggccacaagcgaagaggccctgaggcagtactgtgtgaatagactgggcctgcagaaccctatcattcggctgatgaagattcccatgaaggccctggtcaagcggaacggctattggctgagaatcgccggaagaaccggcaaccagctgtacgccgataatgccgtgtccatgtgcctgaacctgcactggatcaattacatctacgacatggaacggttcctcgagttcggcaagaccgaggatggaaagcacagcattagctacgagcggaacatccagctctacgaggaaatcctggaaaagcacctgaacggcatcttcagcaacaagcccaacgagatcggcaacaagctgaacaacagccacagcgcctttgagaagctgagcatcaaagaacaagtgaaggtcctgctggaactgctgaaggctacccagtatcagaacctgcgcgtggaagccaaagaaatcgacctgaagatgagccccatcaagatcagcaacgacgtgctcggccaggacgagttcctgctgatcaatcagtccgtgaccggcatctacacctccgtgatcgatctgagaaccgtgggatcc

SEQ ID NO: 299 - DNA, 4071 bp, synthetic construct
  misc_feature 1..4071: note = Synthetic sequence or unknown origin
  source 1..4071: mol_type = other DNA
ggtaccaagaaagtgggcgagtactacctgggcctcgacatcggaacagattctgtgggctacgccgccaccgacaagagatacgagctgctgaagtacaagggcaagcccatgtggggcagccacctgtttgatcctgccagccagtgtgccgagcggagagcctttagaacagccagaagaaggctggacagacggcagcagagagtgcagctggccgacgagatttttgcccctgaggtgctgaaggtggaccccatgttctacatcagacggaaggccagcgctctgtgcagagaagatagacccgacatggacgacatcaacagcagcttcaacgacaaagagtacaaggataagcacttccacgatcagtaccccaccatccaccacctgatcatggacctgatcaacaaccgcgagaagaagttcgacatccggctgatcaatatcgccgtggactggctggtggtgcacagaggccattttctgtctgacgtgggcaccgccaatatcgagagggtgcagaacttcgaccctatctacgaagagttcctggcctactacgacatcgaggatatcgagaagccctgggatgccgtggatgccgaggcctttggcaacatcctgaaagagaagggcatcaaccggaagaagaacgacctgaaagaactgctgtaccacggcacaatccccaacgacgagtacttcatggacaagaaagagctggtcaacttcctggctggcggcaaggtgcagtgcaacaagctgttcagaaacagcgacttcgacgacgacctcaagatgagcatcagcgacgagatggaagtcctgctgcctcagctgggcgattatgccacaatcgtgggcagaatggccgctatgtacgattggagcgtgctgagcgatatcctgagcagcagcgcctacatcagcgaggccaagatcaagatctacgagcagcacagcaacgatctgaagcggctgaagagattcgtgaagaagtactacagcagcaagacctacttcgagatcttccgggccagctccaaggacctgaccaattacaccgcctacagctacaacctgaagtccgtgaaggacggcaaagagtatcccaagaagaaagctacccgcgaggacttcctggtgtacctgaagaaaaccctgaacctggacaacatcgagtacgacaaggatgaccagctgttcgtggaagagatgaaggaaagaatcggcgacggcagcttcctgcctaagcaagtgaacagcgacaacagagtgatcccctaccagctgtactacgacgagctgcggagaatcctggaaaacgccagccggcactacccatttctgagcgagaaggatgccgacggctacgtgaactccgagaaactgctgtctatcatcaagttcaggattccctactacgtgggccctctgcggaaggacaacaacagctttggctggatcgagagaaaggccgagggacccatcagaccctggaacttcgaggaagtgatcgacatcgacgagagcgaggccgccttcatccggaagatgaccaactactgcacctacattcccggcaaggacgtgctgcctaagtggtccctgctgtacaccaagtacaccgtgctgaacgagatcaacaatctcaagagcaacggcaagggcatctccgtggaagccaagaaggccatctacaacgacctgttctgccggtttaagaaagtgacgcccaagatgatcaaagaatacctgcgcgacaacggctacatccagaagaatgacgagatcagcggcatcgacgtgcagatcaacgcctctctgaagtcccggcaggatttcaacgacgtgctgaatcagggcatcctgagcgaagaggacgtggaacggatcatcacccggaacacctacagcgaggacaccagacggtacagactgtggctgaagaaagagtaccctaagctgaacgacgacgtgatgcggcggatcggcaagctgaagtataccgactttggccggctgagcggattcttcctgtctgaactcgtgggcgccagcaaagagacaggcgagagcggcaccatcatgtactttctgtggaacaccaacgagaacctgatgcagctgctgtccgaccggtacaccttctccgatgagatcgagcagatccggaacaactactacgccgagaacaagctgggcatcaatgagcagatggaaagcctgggcatctctaacgccgtgaaaagacctgttgtgcggaccctggccgtggtggacgatgtggtttctacactgggcaaagtgcccgagaagattttcgtggaaatggccagaggcgaggacgagaaaaagcagcggaccgtgtccagaaaagagcagattctgaacctgtaccgccaggtggaagaggacacacggctgctggaaaagcagctggaagatatgggcgagacagccaacaactccctgcagtctgatgccctgttcctgtactatatgcagctgggcaagtgcatgtacagcggcgaggctatcgacctgagccagatcaagaaggacaagtacaatatcgaccacatctacccgcagagcttcgtgaaagacgacagcatcctgaacaatagagtgctggtgctgtctaagatcaacggcgacaaaaaggacgtgtaccccatcgacaagagcatccgggaaaagatgcagcccttctggaagatgctgtgcgagaagggcctgatcaccaaagagaagtacaaccggctgacccggggcacccctttcaccgatgaggaaaaaatgggcttcatcaatcggcagctggtggaaacccggcagagcatgaaggctgtgacccagctgctcaagaacagataccccgacaccgagatcgtgtacgtgaaagccagactggccagcgactttaagaaggacttcgatctggcccctaagagcaggatcatcaatgacctgcaccacgccaaggacgcctacctgaatgtggtggccggcaacgtgtaccacgagaagttcaccaagaagtggttcaggatcaccgacacctactccatgaagaccaaagtgatcttcgccaacgacctcgagcggaacggcgaagtgatctggaaccataagaaagacctggaaaccgtcaagaaaacctacgagaggaacaacatccacctgacgaagtacgcctactctcagaaaggcggactgttcgaccagatgcctgtgaagaaaggcagcggccaagtgtgcctgaaaaaaggcatggacatctctaagtacggcggctacaacaagcctaccgccagcttcttcgtgatcgccaagtacctgaaaggcggcaagaaagaagtgtctttcgtccccgtggatctgatggtgtccgagagatttctggccgactacaagttcgcctgcgagtatatcaaggatgtgctggccggaatgaacaccaagaaaatcgagaacgtggaactgcccttccggaaccgggtcgtgaagattaagagcaccctgtgcctggacggcgtgaaagtgtgggtcaacggaaaggccaacggcggaaagatcgtgctgctgtctctggccgagagcgcctactatgacaacgacagcgtgtactacatcggcaagattgagcgctacgtcgagaagaaaaagaccaacaggcggctgcagcacgacgagcagtacgatgagctgagcgaggaaaagaacctgcggctgtacgacatcctgatcgagaagatgcacaccaagcagttcgccaacatgcccggcaatcagtgctctgtgctgaaagagggcagagagctgttcatcaagaacgatttcgacagccagatccagatcctcgtgaactgtgtgaacctgctgaaatctggcagagccggcggatgcgatctgaaagccattggaggcaagaacgccagcggcgtgatgaccctgggagccaatatcagctccagcaagtataaggacatccggatcatcgactacagccctgccggactgcacctgaatgagtctgtgaatctgatggaactgggatcc

SEQ ID NO: 300 - DNA, 4071 bp, synthetic construct
  misc_feature 1..4071: note = Synthetic sequence or unknown origin
  source 1..4071: mol_type = other DNA
ggtaccatcaaggactactacctgggcctcgacatgggcacaaattctgttggatgggccgccaccgacgccgagtacaacctgatcagaaagtccggcaaggacctgtggggcgtcagagagtttgacgaggccgagacaagcgccgagagaagaacccacagagtgaacagacggcggctgcagagagaacaggctagagttggcctgctgaagggcttcttcgccgacgccattaagaaggtggaccccaacttctaccagcggctggaaaacagcaagtacttccaagaggacaaggacgccgaagtgaacggccccaacggcatcttcgacgacaagaactaccgggacgccgactactacaagcagtaccccaccatcttccacctgagaaaagagctgatccagaacgccaacgctccctacgatcccagactggtgttcctggccatcctgaacatgtaccggcaccggggccactttctgaatgtgggactgagcggcgacggcaacgagatcacaatcgaggaagcctacagctccctgctgaacgccgtgcaggattactttggcctgagcctgcctgagggcaaagccaaggatttcgagaaggtgctgagcgacaagaatctgagccggaccgggaagtacgagaagatggccgagatctgcagcacccagaaaaccgacaagatcaaggccgccattctgaagtgcatctgcggcctgaaagtggacgccaagcagatcttcaccgagttcgagagcgaggaaaaggtggaaatcgagttcagccggtacaccgaggaaagctccctgatcctgaatgagaagctgggcgacgactacttcgagttcatcgagatcatgcaccagatctacgacctgggcagcctggtcaacatcctgaagggcgagacatacctgagctacgccagagtggaagagtatgccaagcaccacaaggacatccaggtgctgaaggccctgtaccggaagtacaagaccaaggacgagtacgacgagatgttcagaagcgacaccaagggcacctacagcgcctacgtgaacagctacaacacagagaagtacaacatcaacggcaagcccgtgcggcggaacatgaaggaaagaagcaaggacgacctgtacaagacaatcaagagcgccctgaaggacatcaaggataaggacgtggactacgtgctggaagagatggaaagagaggccttcctgcctaagcagctgacagccggaaacggcgtgatccctaatcaggtgcacgccagagagctgaaggctatcctgaagaacgcctccaagtacctgggctttctgaacgagaaggacgagagcggactgaccgtggccgagaagatcagcgcaatcttcagctttcaaatcccctactacatcggccctgtgtccgagaagtctgaggccaatggcggcaatggctgggtcatccggaaagaaaaaggcatggtgctgccctggaacatcgaagagaagatcgacagcgagaaaaccagccagagattcatcgagcggctcgtgaacaactgcacctacatgtccggcgagaaagtgctgcctaagggctctctgctgttcgagaagtactgcgtgctgaacgaaatcaacaacatccggatcgacggcgagcggatcagcgtggaactgaagcagaagctgtacaacgagctgttcatcaccgggaagaaagtgaccagaagcaagatcgagaagttcttcgtgtccgagggcgtgatcaaagagaaagagcagatcagcggcatcgacaaccagatcaacaactccctgagcagctacggcaagctgatggacatcctgggagatgacatcaagaccgacaagggcaagaaactggccgaggacatcatctacctggccacaatctacggcgacgcccggaagatgctgaaagacagcctgaagaagaagtacggcgacatcctgagcgagaatcagatcaagagaatcagcggcctgcggttcaaggactggggaagcctgagcaaagaatttctggaaatgaaggcctgggataagaacaccggcgaagaggtgtccctgatcggcgagctgtgggacagcaacaacaacatgatggaactgatcaacagccccgactacaccttcaaggccgtgctgcaagaaaagcagaccaagctgaccaaggtgctgtccgacttcaccgtcgaggacctgcaagagtactacttcagcgcccctgtgaagcggatgatctggcagaccctgggcatcatcaaagagctggaaaagatcctgggctgcgcccctaagcggatctttatcgagatgacccggaccgatgaagagaagggcgataagggcagaaaggacagcagagccaagacactgctggaactctacaagaacctgaaggatgagagccgcgactggaagaaagagatcgaagaggccgacaaggatggcaaactgaagatcaagaagctctacctgtactacatccagaatggccggtgcatgtacacaggcgagcccatcgatctggacgatctgttcaacgacaacctctacgacatcgaccacatctaccccagacactacgtgaaggacgacaatctgggcaacaatatggtgctggtcaagaaaacctgcaacgcctacaagagcgacgattaccctctgcctgccatgaagcccgacgtgtacgaactgtggaagcggctgttccggaccggcttcatcaatgaggaaaagtacaagcggctgaccggcaagcagcctttcacagatgagcagaaggccggctttatcgccagacagctggttgagacaggccagggaacaaaaggcgtggccgatctgctgaaacagctgctgcctgacaccaccatcgtgtacagcaaaggccggaacgtgtccgatttccggaaccagtataagctgctgaagtcccggatcgtgaacgacttccatcacgcccaggacgcctacctgaatatcgtcgtgggcaacgtgtactacgtcaagttcacacaggaccctctgaactacatgcggaagctcgagaaagagaagaaggcctttagctaccacctggggaagatgtttgagaagaacatcaccatcggcaatgagaacgcctgggtcgcctctgagaagaatggcgagtctggcacaatcgtgaccgtgaaaaaagtgatggcccgcaacacccctatgatcaccaggctgaacttcgagaaccacggccggttcagcaaagagacactgtactccgctagagtggccaagaaagacaactacgtgcccctgaagatgaacgacgccaagatgagcgacgtgaccaaatacggcggcttcacaaacgtgtacggcgcctacttctttctggtcgaacacgaagaaaagggcaaaaaagtcaagaccctggaaaccgtgccagtgtacctggccgaaaagattgccagaggcaatggcgccctggtcaagtactgtatcgaggatctgggactcgtgaaccccagaatctgcctcgagaagattaagatccagagcctgctcaagatcgacggattctggtatcacctgagcggcaagaccggcaacagaatcgtgctgagaaacgccgtgtctctgtgcctgagccagagctggatcaattacatccacgccatcgaaaagtataacgagagcaagcgcatccccgatgagatcaagcgcgagaagaatatcgagctgatcgagacactggctgagaagcacatcgagggcatctataagaagcggcagaaccccatcagcgaactcatcaagaatgccaaagaagtgatcgagagcctgtctctggtggaacagtgcaatctgatcatcgaactgctgaagctgagctgcatcggcctgacctctgccgacctgagatgtatcaagggcgccgagaaaagcggcgtgatgctgtttagcaagggcatctccaaggccaacgagttcaagatcatcaaccagagcatcaccggcttctacgagaacgagattgacctcctgaagctgggatcc

SEQ ID NO: 301 - DNA, 4074 bp, synthetic construct
  misc_feature 1..4074: note = Synthetic sequence or unknown origin
  source 1..4074: mol_type = other DNA
ggtaccgagaacaagaactactacctgggcctcgacatcggcaccgattctgtgggatatgccgtgaccgacgagaactacaatctgctgagattccacggcgagcacgcctggggagtgacactgtttgatgaggccgctctgtgcaccgacagaagggcccatagaacagccagaagaaggctggacagacggaagcagagagtggacctgctgcaagagctgtttgccgtggaaatcggcaaggtggaccccagattcttcatcagactgcaagagagcgccctgtacagagaagatgccggcgacgcctacagcttcttcaacgatgagaattacaccgacatcgactaccacaagcagtaccccaccatccaccacctgatcgtggatctgatgaccagcagcaagcctcacgatgtgcggctggtgtatctggcttgtgcttggctggtggcccacagaggccactttctgagcgacgtgaacaaagagaacatcagcgagctgaccgacttcaccaaggtgtacgacaacctgctggcctacttcgccgagaatgaactgcctgctccttggggcgattgcgatagagccgcttttgccgacgtgctgaagagaaagaccggcctgagctacaagcagaagctgctggccggaatcctgtacgccgatggcaaactgcctaagaccgccgaggatgacccttacgccaaggatgtgctgatcaaggccatctgcggcagcaaagtgaagtgcagcgacctgttcaacaacaccgagtacgaggaactggataccaacggcttctgcctgggcgccgatgaagaaacacttgccggcgtgatggccaacctgtctgatgccgatgccgatctgtttgccagactgaaggccacctatgactgggccgttctggtggatgccctgaacggacaggattgcatcagcctgagcaaggtggccgtgtacgaccagcacaagaaggacctggccacactgaagtactttatccggaagtacgccaacgagaagtatgccgaggtgttcagaaagagcgccgagacaaactacgtggcctactcctaccacaacaagaacaaaaacatcacgctgcccaagaagaaagccaacaaagaggacttctgcaaatacgtgaagggcatcattgccgccttcaagggcaaagtggaagagaaggatgctgccgcctacgccgacatggtggatagactggatctgctgacatttctgcccaagcagcgggataccgacaacagagtgatcccctaccagctgtattggtacgagctgaagaaaatcatggaaaaggccgggacctacctgcctttcctgagcgcttctgacgccgacggaatccggaccgatgagaagatcatggacgtgttcaccttcagagtgccctacttcgtgggccctctgaacaagcacagcaacagaggctggatcgagagacagcccggcaagatctacccctggaacttcgagaagatggtggacctggacaagtgcgaggaagccttcatcaagaagctgatcaactactgcacctacattcccggcgagaaagtgctgcccaaagagagcctgacctacgccaagttcatggtgctgaacgagatcaacaacctgaagatcgacgagcagcccatcagcgtggaactgaagcagatcatctactacgagctgttctgcaagaagcggcgggtcacaagaaaggccctggaagagtacctgctgagcaacaaccacatggccaagggccagcacgtgtccggaattgacgagcagatcaagagcagcctgaaggcctaccacgacttcaagagactgctggccaacaaggtgctgaccgaggaacaggtggaagccatcatcgagcggatcacctacgtggaaaaccccgccagagttagagcctggctgaagaagaactacgccttcctgagtgacgccgatgtgacctatatcgccaagctgaagtacaaggacttcggcagactgagctacgcctatctgaatggcctggaaggctgcgagacagattctgccacaggcgaagccgccacaattctgagcgccatgtggaacaccaacaacaatcagatggaactgatgagcgaccggttcacctacagacagagcgtgctggacctgcaagaacagtactacgccacacacagcaagaccctggccgagagactggacgacatgtacctgagcaatgccgtgaagaggcccgtgatcagagccctggaaatcaccaaggacgtggtcaaggcttttggcggagcccctgccaaggtgttcgtggaaatgacaagaggcgccaccgaggaccagaagaacaagaggaccaagaccagactgcagcagctgcgcgagctgtacgagaagtgtaaacaggacgccagggacctgaatgcccagctggatgccatgggcgacaacgccgataattgtctgcagagcgacgccctgttcctgtactacctgcagatcggaaagtgcctgtacaccggcaacaccatcgacatcacagccctgaagtccggccggtacaacatcgagcacatctaccctcagagcctggtcaaggacgacagcatcatcaacaacgagatcctggtggaaagcaacgccaacggcgccaagagcgattcttatcccgtggccgtggacatccagaacaagcagggtgctctgtggtctatgctgcaccacgccggactgatgtccgacgaaaagtacaagcggctgacccggaccacacctttcagcgcagatgagaaaatgggcttcatcaaccggcagctgacagagacaagccagtctacaaaggccgtggccactctgctgaaagaactgtaccacaccgagatcgtgtatgtgaaggcccggctgaccagcgagttcagacaagagtatggcctgctgaagtcccggaccgtgaatgacctgcaccatgccaaagacgcctacctgaacatcgtgaccggcaacgtgtacagcatgcggttcaccaagcagttcttcaggatcgatgagcagtacagcctgaacacatgggccctgtttggccactccgtgatctgtggcggaaagacagtgtggacccctgccatgctggacaccgtgaagaaaaccgccgtgatggacacagcccacctgaccagatacgcctattgcaagcacggccctctgttcgacctgatgcctctgaaagccggacagggccagattgagcagaaggccggaaagtctgttgagaagtacggcggctacaacaaggccgccatcagcttttgcctgattgtgggctacaagaccgacaaggctaaggacgtgatgatcatgcctgtggaactgctgttcgccgacagagtgctggcctctgctgattttgccgccacatacgcccaggacaagatcggcagaatgctgaacaaacccgtgcacgacatcacctttccatgcggcatgcggatgatcagaatcaacaccgtgttcgccctggacggcttcaggggctactataccggaatcaccgccaccaactggtgcttcagcagctttatgcccctgagcctgaaaggcgagtggcagaactacatcaagcacctggaaagcttcgccgaaaagacaaagaagaaccccggcctgacataccagaaaacctacgacaagatcagctgcgagaagaacatcgaactgtacgatgtgctgtgcgacaagctggccaatagcatctaccagaagaggcctggcaaccccgtggataccatcggaaagggcaagagcaagttcgccacactggacgtgaaggtgcaggttcagcaactgctgagtctgctccaggtgttcggacctacatctggcggcatcgatctgacacagattggaggcgctgccaaggccgctacaaccagaatcggcctgtctatcaccacactgagccacagcttcacccacagcatcgtgatcatcgatcagtccccaagcggcctgtgggagagccagagcatcaatctgctcgatctgatcaagggatcc

SEQ ID NO: 302 - DNA, 4077 bp, synthetic construct
  misc_feature 1..4077: note = Synthetic sequence or unknown origin
  source 1..4077: mol_type = other DNA
ggtaccaagcagcaagagtactacctgggcctcgattgcggcacagattctgtgggctacgccgtgaccgataccgagtatcaccctctgagattcaagggcgagcccatgatgggcatcaccacatttgatgccgccagcctgtctgccgacagaagggccaacaggaccaacagaagaaggctgcacagacggcagcagagagtgcagctgctgcaagaggtgttcgcccaagtgatcaccgaggtggaccccagattcttcaccagactgagagagagcgccctttggagagaggacaagagcgaccctagcgacccctacgctctgttcagcgacaacggcttcaccgacaaagagtaccacaagaagtaccccaccatccaccacctgatctgcgacctgatgcagagcacccagaaacacgatgtgcggctggtgtatctggcctgtgcttggctggtggcccacagaggacattttctgagccccgtgaaagaggacaacatccgcgaggccgtggatatcgctatcccctaccagacactgatggattggttcgacgaagtgaagccctgggatgccgatcctgccgcttttggctctgtgctgaaaaagcggagaagcgtgcgggacaaagagaaagagttctacgccctgctgtacgagggcaagaagcccagcgatctgtttagcgaccctgacgatcctgacgcctttgccgtgtccagagtgatgatgctgagactgctgtgcggaggcaaggtggcccctaaggatctgttcccctacaagaccgataagtacgccgagctgagcagctttagcctcggcggcaaagaggaagaactggaagagatcctgctgcggctggaagaggatggcgagctggttattagactgaaggccctgtacgactgggccgtgctgtctgatgttctgagaggcgagacatccatcagcgccgccaaagtgaaaacctacgagcagcacaagcaggacctgaagtggctgaaggcctttatcaagaaatacgtgcccgaccagtacgacaaggtgttcacagccgagcaagagggcaactaccccgcctatacagatcacccttctgatggcaagaccggcaccaagaatgccagcaaggccgagttctccgacttcctgaagaaaatcgtgaaggacatccccgtggacgagacagaccggcagaaatacgacgacatgatcgccagactggacgccaacaccttcctgcctaagcagaaggataccgataaccgcgtgatcccttaccagctgtacgccgtggaactgagggacgtgctgaaacacgccagcgcctacctgccattcctgagcgagaaggacgagaacggaagatctgccgccgacaagatcgcccagatcttcagattcagaatcccctacttcgtgggccctctgaacagaaacagcgacagagcctggctgagccggaaagagggaagaatcaccccttggaacttcaccgagatggtggacctggatgccagcgagaacgccttcatcagaaacatgaccggccactgcacatacctgcctggcgaacctgtggtgcctgctaatgccctgtgctacgccaagttcaccgtgctgaacgagctgaacaccctgaagatcaacagcgcccctatcacagtggcccagaagcaggccatctacaacgacgtgttctgcaagtacaagaaacccaccgtgaaagccctgcggaactactgcatctgcgagggctttatgcctgccgatggcatcctgagcggaatcgacatcgaaggcggaatcaagagcacactggccccattcttcagctttcggaacctgatggaaagcggcatgctgagcgaggaacaggtggaacggatcatcgagcggatcacctgtaccgaggaccagatccggctgagaagatggatcgacgcccagtttccacagctgtccgaagaggacagacggtacatcagcagactgaagttcaaggacttcggccggatgagccaccggtttctgtgtgaactgcagggcgttaacaagcagaccggcgaagtctgtacagtgctgcaggccatgtgggagacaaacgacaacctcatgcagatcgtggaaagcgatcagtacaccttcgccgacgtgatcagagaggaacagcgcgagtactacagaggccagcctagcagcctggacaagcggatggatgagctgtacctgtctaacgccgtcagacggcccatctacagaaccctggacattgtgaaggacgtggtcaaggccaccggacacgcccctaagaaaatcttcgtggaaatggccagaggcggcaccgaggaaacaaagggcaagagaacccagagcagaagaagccagctgctggaactgtacaagaactgctctgaggccgaggccagagaactggctgccctgctggaaagcaagaccgacaatgagctgcagagcgagaaactgtacctctacttcatgcagctgggcagatgcatgtacagcggcaagcctatcgacctggaacacctgaacgacaacaagtactacgacgtggaccacatctaccctcagtgcagagtgaaggatgacagcgtcctgaacaacaaggtgctggtgctgtccaagtacaacggcgacaagtccgacacataccccgtgccatctgagtggcggcagactatgtacggctactggaagatgctgcgcgagaacaacctgatcacagaagagaagttccggcggctgaccagagccacaccttttaccgatgccgagaagtacggcttcatcgatcggcagctggtcgagacaagacagagcaccaaggccatcaccactctgctccaagagagataccccgacaccgagatcgtgtacgtgaaggctggactggtgtccgagttcagacacgagtacgacctgctgaagtcccggaccgtgaatgatctgcaccacgccaaggatgcctacctgaacatcgtcgtgggcaacatctaccacgagcggttcaacaagaactacttccggatcgaccaagagtacagcctgaacaccagacaggtgttcggcagacccgtgtatgtgaacggcacctgttgttggaagggcgagagcgacctgggcagaatcaaggacatcgtgcggaagaaccacatccacgtgaccagatacgccttctgcagacggggccagttctttgaccagatgcctctgaaagcctctggcgacggcgagctgctgcctagaaaaaaggatctgcccgctgagagatacggcggctacagaaagcctaccgccagcttcttcgtgctggccaaatatttcgccggcaagaaaagcgacatcatgattgcccctgtggaactgctgagggaaaaagagtttgagaaggaccccaaagtgaccgccaaagaagccgtggaaaaggtcctgggcaaagctgtggacagaatcgagctgcctatcggagcccggaagctgaaagtgaacaccgtgttctccgtggacggcttcagatttgccctggccggaaaatctggcggaggaaggcaactgggaatctctcctctggccgctctgaccatcgatgccgatagcgagttctacctgaagagactggaaagcttcaccaacaagaaggccaagaacaaagagctgaagatccagcaggcctacgacaagattagcgccgaggaaaacatcaagatctacgacctgttccagtccaagctgagcacataccctttcagcaagaggcccgccaacatcttcgatgccgtcgagaagggcaaagagagattcgagagcctgcctctggaagatcaagtgaccgtgctggaacagattctcctgagctttggcagaagcggaggcggctctgatctgaagcttattggcggagtggccaaggctggcgtgccaatgcttagctctgccctgagcaactggaaaaagaactacaccgacgtgcgcatcatcgaccagagcgccagcggactgtttgaaaagcagagcgtgaacctgtctgagctgctgggatcc

SEQ ID NO: 303 - DNA, 4077 bp, synthetic construct
  misc_feature 1..4077: note = Synthetic sequence or unknown origin
  source 1..4077: mol_type = other DNA
ggtaccggcagagattactacctgggcctcgatatgggcacatcttctgttggctgggccgtgaccgacgagaagtacaacctgctgagagccaagggcaaagacctgtggggcatcagagagttcgaagaggccgaaggcggaatcgccagacggcagaacagaatctctagacggcggagacagcgcgagcaagtgcggattggactgctgaagtcctacttcgccgaagagatcgagaaggtggaccccgacttcctgcagcggctggaaaattccaagtaccacctgagcgacaaggacgagaaagtgcggtacaagagcgccatcttcaacgaccccgagtacaccgataaggactactaccgggactaccccaccatcttccacctgagagccgagctgatccacaatcaagagccccacgacatccggctggtgtatctggccctgctgaatatgttcaagcaccggggccactttctgaacgccagcctgtctgccgaggaagagacacagagcatgtctgacgcctacaccgccttcagagccctggtggaagaagtgatgaccgccaacgagacagagaacctgtttttcccggacggcaaggccgacgagattgaggccatcatcagcagcagagactacaaccggaagcggaagtctgagctgatgaccgagatgctgggcttcaccaagaaggataaggccgctcaggccctgatcaagggcatgtgtggactgaccgtggacgtgaaaaccgtgttccgggaaatcgagagcgaggccaagctgagcatctccttcagcgacagcaactacgatgagaagatcgtcgagatccaagaggtgctggacgacgagcagctggaactgctggaagccgtgaaaacaatctacgacatcggaagcctggccggcgtgctgaagggcgagaaatatctgtccgacgccagaatcaccgactacaacaagcacaaagaggacctggctctgctcaagaagatcatccggaagtacacagaccagaaaacctacaacgacctgttcagaggcaccgagcctggcagctacagcgcctacgtgaacagcaccaacagcggcaagaaacagcggagaaacatgggcggcaacgccaagagaaatcaagaggccttctacgcctctctgaagaagctgctgaacaagctgcccagcgaggacgacgatgtgcagaagatcctggccgatatcgacaaagagctgttcctgcctaagcagctgaccttcgccaacggcgtgatccctaatcaggtgcacgccagagagatgaaggccatcctgaacaacgccgagcagtacctgcctttcctgaccgagaaggatgagagcggcctgaccgtgtccgagagaatcctgaagctgttcagctttcaaatcccctactacgtgggccccgtgaccaccaaatctagcagagatggcggcaatggctgggtcgtgcggaaagaatctggacaggtgctgccctggaacatcgaggacaagatcgacatggacgccaccagcaagaagttcatcgagaacctgatccgcgagtgcacctacattgccggcgaaaaagtgctgcctaagggcagcctgctgtacgagagatactgtgtgctgaacgagatcaacaacatcaagatcgatggcaggcccatcgacgtggaactgaagcagaagattttcgaggataagttcatgagcgggaagaaagtgacccggaagcagctggtcacatacctgcatggaaagggcgtgctggaagatgacgcccagctgaccggcatcgacaagaccatcaacaactccctgagcagctacggcaagttcctgggcgtgttcggcgacgagctgaagaaggattcctgccagatcatggtcgaggacatcatccgggactgcaccatctacggcgactccaagaagcggctgagagagacactgcagaagaaatacgtcgacaacaacaacctgtccgagtctcagctgaagcgcatcctgggctttaagttcaaggactggggccgcatgagcaaagaatttctggaaatgcagggcatcaaccgcgagacaggcgaagtgatgtctctggtgcaggccatgtgggagacaaacctgaacctgatggaactgatctactccgaggacttcaccttcgccgaggctctgcaagagaagcaggccaaggattacctgacactgagcgagttcaagttcgaggatctggacgagtactacttcagcgcccctgtgaagagaatggtctggcagaccctgctgatcatcaaagaactggaaaaggtcctgggagcccctcctaagaaagtgtttatcgagatgacccgcagcgacggcgtgaaaggcgatagaggcagaaccatcagccggaagaagcagtttgaggacctgtacaagaagattaaggacgagtcccaggactgggccagcatcatcgataatgccgatgcctccggcaagctgcggagcaagaagatgtacctgtatctgacccagatgggcaagtgcatgtacaccggcaagcctatcgacctggacgatctgttcgacgacaacaaatatgacatcgaccacatctaccccaggcactacgtgaaggacgacaacctgggcaacaatctggtgctggtggaaaagaaggccaacgccagcaagggcgacagataccctctggacaccgacatcagaggcaagatgcacggcacctggaagtttctgaaagagaagggcctgatcaccgaggaaaagtacagacggctgacaggcagcaaccctttcagcgaagaacagcaggccgactttatcgccaggcagctggttcaaaccagccagggaacaaaaggcgtggccgacctgctgaaacagctgctgcctgatgccaagatcgcctacagcaaggccagcaacgtgtccgacttcagaagagactacgatctgcccaagagcaggctgatcaacgacttccaccacgccaacgacgcctacctgaatatcgtcgtgggcaatgcctacctggtcaagttcacccagaatcctctgaactacatccgcagcggcgacgtgcagtacaatctgggcagaatgttcgagaaggacattgtgcggaatggcgaagtggcctggctggccgatgatggcaagggcaatcacggcaccatcgtgaccgtgaaaaaagtgatggcccgcaacacccctatgatgaccagaatggtgctgaatggccacggcgccattgccaatgctacactgtatcctgcctctaaggccagcgccgacaactacattcctctgaagggcagcgactctaagatcgccgacgtgaccaaatacggcggctttaccagcgtgtccacctccagatttgtgctggtcgagcacctcgtgaagaaagagcggatcagaaccctggaagccctgcctatcctggtggccaatagctgcaagaccatggaagatattgagaactactgcgaggaagaactggggctgatcgcccctaaagtgaagctggacggaatcaagatccagagcctgctgaagatcaacggcttctatgtgcacctgtctggcaagaccaacaaacagctggccctgagaaacgccgtgaacctgtgtctggacgccaagtggaaagagtacatccactacctggaaaaagccagcaacaacggcaactacggcaatcccatctgcagcgacatgaatatcgagctgtactccattctggccgagaagcacagcagcagcatcttcgccaagaggccaaatcctgtgggcaccaagctggtcaaagagaaagagacattcagcaagctcgaactggtggatcaggtgtccgtgctgctgcagattctccagctgagcgccattggcatcacccaggccgatttgagagctatcggcggagccggaattgccggaaagatgctgatctccaaggacatcagcaaacaagaagaggccctgctcatcatgcagagccctaccggcctgtacgagtccaccatcgacctgaaaaccatcggatcc

SEQ ID NO: 304 - DNA, 4080 bp, synthetic construct
  misc_feature 1..4080: note = Synthetic sequence or unknown origin
  source 1..4080: mol_type = other DNA
ggtacccagggctactatctgggcctcgacatgggcacaaattctgtcggatgggccgtgaccgactacgagtaccggctgctgagattcaagggcaaagacatgtggggcatcagagagttcgacgaggccaagcctgccgtggaaagaagaaggcaccggaccaatcggcggagacagcagagaaaaatggtccgactgggcctgatcaagagctacttcgccgacgagatcagcaagatcgaccctctgttcttcaaccggctggacaacagcaagtactttctcgaggacaaggacgagcaagtgcggtgcaagaacgccatcttcaacgacatcaactacaccgacaaggactactacgctcagtaccccaccgtgttccacctgagaaaagagctgatcgagaacaaagaaccccacgacgtgcggctggtgtacctggccatcagcaacatgttcaagcaccggggcaactttctgatcagcggcctgggcatcgaccgggatgatgagacaattggcgaggcctacctgaaggtggccgacatgctgagcgaagagttcgatgtggaatttgacaagaagattgacctgagcttcttcgagaaaaccctgagcagcagagagtacagccggaccaagaagtccgagctgatctgcgacatcctgcaagtgaagaactccgagaagcagaaaaaggccttcgtgaagtgcctgtgcggcctgaacgtgaagatcagcgacatcatcggcgagaacggcatcgagctgagcgacgaggataagaaaaccgccttcagcttcaacgataacgactacgacgtcaagatcatcgagatcgagcagaagatcggagagaacaagaccaccgtgatcgccaagctgaaagagatccacgacaaggccctgctgtccgagatcatgaagggcaagccttacctgagctacgccagagtggccgattacgagaagcacgcctacgacctgaagatcctgaagcgcgtgatcaagaagtactttagcaatcaagagtacgacaacctgtttcggagcgaggaaaacggcacctacagcgcctacgtgaacagctacaacagcggcaacaagagccggcggaactacaaagagcggaagcaagaggacctgtacaagaacatcaagagcctgatgaagtccctgggcgacaacgacgacatcgacgtgcagtacatcaaggatgagatcgacagagagaacttcctgcctaagcagctgaccttcaagaacggcgtgatccccaaccaggtgcacgccaatgagctgaaagccatcctgaacaacgcccaagagtacctgaccttcctgaacgagaaggacgagagcggctacaccgtgtccgaaagaatccagcagctgttcagctttcaaatcccctactacgtgggccccgtgtccagcgattctaatggctgggtcgtcagaaaagaggaaggccccgtcctgccttggaacatcaaagagaaaatcgacctgaaaaagacctccgaagagtttatcggccggatggtccgaaattgcacctacatctctggcgagagagtgctgcctaaggccagcctgctgtatgagaagtacagagtgctgaatgagatcaacaacctgcggatcgacggcgagagaatcagcgtggaactgaagcaggatatcttcaacaccctgttcctcaaaggcaagagagtgacccggaagcagatcttcaactacctgcacagcagaggcatggcccaagaggatgcccagatctctggcatcgatgtgaccgtgaacaacagcctgagcacctacggcaagtttctgcccatcttcggcgagcacctgaaagaggacagctataagaagatggccgagaacatcgtgttctggtgcaccgtgtacggcgacagcaagaagtttctgaaagagcagctggaagagaagtacgccgacaagctggacgaagcccagatcaagagaatcctgggcatgaagttcaacgactggggcaacctgtccaaagagttcttcgagctgtccggctgcaacaagtccaccggcgaagtgatgcctctgatcaacgccctgtgggagaacaacctgaacatgatcgagctgctgaactccgacgagttcacatacaaagagagcctggccgaaaagcagaacgtggccatcaagtccctgtccgagtacaccatcgacgatctgaacgaggaatacttcagcgcccctgtgaagcggatgatctggcagaccctgatgattatcaaagaaatcgagaagattatgaaggcctctccggaccgggtgttcattgagatgaccagaaaggatggcgagaagggcgacaagggcagaaagaacagcagaaaggacaagctgatcgccctctacaagcagatcagaagcgaggacagcgcctggaagaaagagatgagcagccggatcgagaagtatgacgagaatggcagcctgcggagcaagaagctgtacctgtacttcacccagaaaggcctggacatgtacaccggcaagcccatcgacatcgatgacctgatgagcgccaactctaagtacgatatcgaccacatctaccctcggcactttgtgaaggacgacaacatcaacaacaatctggtgctggcctccaagaccgccaacagcgagaagtctgatatctaccccatcaaggacaccatctaccagaagatgaagtctacctggaagctgctcaaggacgaaaacctgatcaccgaggaaaagtaccggcggctcgtgggcagagagccttttacagacgaacagaaggccggctttatcgccagacagctggtggaaaccagccagggaacaaaaggcgtggccgatctgctgaatatgctgctgcccgactccaagatcgtgtacagcaaggccgacaacgtgtccgagttccggcacaaatacgagatccccaagagcaggctgatcaatgactaccaccacgccaacgacgcctatctgaacatcgtcgtgggcaacgtgtactacaccaagttcacacagaacccgatcaacttcatcaagaaagagtactccagcggcgaccggaagttcgagtacaacctgagcaagatgtttgagtgggacgtcgtgcggggagataaggtggcctgggttgccgagaaggatagaaagcacggcaccatcgtgaccgtcaagaagatgatcaacaagaacacccctatcctgaccagaatgcccgtggaaggacatggcggactggccgatgccacactgtatagccacaagaaggccaagagcgatacctacattcccctgaaggccaccgatgccaagctgcaggacgtgaccaaatacggcggctttagctctgtggccaccgcctacatctttctggttgagcacgagctgaagggaaagaaagtgcggaccctggaaaccgtgcctctgtacatgaaggccgagctggaatcctccgtggaacggctggaacagtactgcagagacaccctgggactgattaaccccagcgtgcggattaagaagattaagctgcagagcctcatcaagctgaacggctactacatgcagatctccggcaagaccgacaagcagttcggcatgagaaactgcgtgcagctgtgtctgaagaaagaatggatcgagtacgtgcacaagctcgagaagttccagagctatggcgtgatcgacgatatcatcagcgagcagaacaatatcaagctgtacgacgagctgtgcgagaaacaccgcaacggcatctacaacaaaaagcccaactacatgggcgataagctcctcaacggaaagaacgagttcgtgaaactgaacaagaacgagcagatcaaggtgctgatccagatcattaagctgaccgtcgtcggcctggtggaaggcgatctgaccctgatcaaagagtccagcaagagcggcaccctgaagattagcaagaatatcaccaacgccaaagaatttgagctgatcaaccagagcatcaccggcctgtacgagaaccgcattgacctgctgagagtgggatcc

SEQ ID NO: 305 - DNA, 4083 bp, synthetic construct
  misc_feature 1..4083: note = Synthetic sequence or unknown origin
  source 1..4083: mol_type = other DNA
ggtacccagaatggctactacctgggcctcgatatcggcaccgattctgtgggctacgccgtgaccgaccaagagtacaacctgaagaagtacaagggcgagcccatgtggggcgtgcacctgtttgaaggcggaaaggatgccgccgaaagaagggcccatagaacctacaggcggcggatcgatagagtgcagcagagagtggatctcgtcggcgagctgtttgccgaggaaatcggcaagatcgaccccgacttcttcatcagacggaaagagtctgccctgttcgctgaggataccaagcacggcgtgaagatctttagaggcaacggcatcacagacaaagagtaccatctgagataccccaccatccaccacctgatcctggacctgatgaccagcgaccagcctcacgacatcagactggtgtatatggcctgtgcctggctggtggcccacagaggccactttctgttcgatttcgcccctgaccagaccgagaagctgctggacttcgacaagaccttcgaagagttcctggactacttcagccaggacgtggcaagaccttggagcgccgaaatcaaagccggcgatctgctgagcatcctgagcatgcagacaggcgtgtccaagaagaaggacgccttcaagcagaagatctacggcggcaagaaggtgtccaaagaggccaccgaggaatttccctacagctgcgacgccatcatgacactgctgtgcggcggaaaagtgaagcccgaggctctgttcacagacccctctatggccgacatcgatagcgttagtctgctgatgggcgacgaggacttcgatagaatcgtgtccgagctgggcgacaatggcgagctgctgtgcaaaatgcgggccatgcagaactgcgccagactgatcaccaccatgagcaacaagaggcctcaggaccctacctgcatcagcagcagcaagatcgccatctacgagcagcacaagaaggacctggaagccctgaagagattcgtgcggaagtactgcaagaaccagtacgccaagatcttccggctggtggaaagcggcaattacgtggcctacagcaagaacctgaagtccgtggccgatcctaagaagttcaagagcgccaacaaagaggtgttcagcgacttcctgctgaagatcgtgaagaacatcaaagtgcggaaagaggacgccgccatgtacaccgatatggtggaacggctggaagccagaaccttcctgcctaagcagaaggacggcgacaacagagtgatccctcagcagctgtacagacaagagatggccgctattctggccaaggccgagaagtacatccccatgctgagcaagcctgacgccgatggcatgaccgtgacacagaaactgctgtctatcttcgacttcagaatcccctactacgtgggacctctcgtgcggcatccacagggaacagcctggatcgagagaaagcagggcagaatcctgccttggaacttcgaggaaatggtggacctggacgccagcgagcagggcttcatcaagaagatgaccaacgactgcacctacctgcctggccagaaagtgctgcctgtgaatagcctgctgtacggcaagttcaccgtgctgaacgagctgaacaatctgaaggtggacggcgtcagcatccccgtgaaagtgaaacaagagctgtacgagagcctgttcatgcagaaacccagagtgaccgtgaagcagatccgggaccatctgctgacccacggctatatgacagtgggctctgagctgaccggcatcgatacaaccttcaaggccggactgaagtcctaccacgtgttcagaaacctgctggaatccggcgtgctgaatgaggccgaggtggaatctattatcgagcacgccgcctacaccgaggacaagagcagaatgagacactggctgaaacagacctttccacagatccctgagggcgacgtggcatatatcctgaagcaggatctgaagcagttcggccggctgtctcctatgctgctggctggactgtacggctccgccaaaaattccgatggcgaggcctttaccatcattgaggccctgtggaacaccaacgagaacctgatgcagctgctgtccgaccggtacaccttctccgagcagatcagagagtacacgaaagagtactacgccgagcatcccgccagcctgactcggagactggaagatatgtacatcagcggccctgtgaagcggcccatcttcagaaccctggacatcatctccgacgtggtcaaggctacaggcaaggcccctgagaagattttcatcgagatggccagaggcggcaccgaggatcagaagggcaagagaacaaagagccggaaggaccagctgctcgacctgtacaagctgatcaagaccgaggacgcccggatcttcgagaaagaactgaagaatatgggcgaaaccgccgacaaccggctgcaagagaggaagctgttcctgtactacctgcagatgggcaagtgcgcctacacaggcgagcctatcgacgtgaacaagctcggcagcggcgactacaacctggaccacatctaccctcagagctacgtgaaggacgactccctgttcaacaacctggtgctggttaagagcgaggccaatggcatcaagggcgacagctatcccgtgcctgagcagttccggaataccatgtaccagacctggcagtactggaaggacaagggcctgatgacagacgagaagttcagcaggctgacccggaaggtgcccttcagcgatcacgagaagcagggattcattaacagacagctggtcgagacacggcagagcaccaaagccattgccacactgctgaaagagagattccccgacaccgccatcgtgtatgtgaaggccggcatggtgtccgagttccggcaagagtttgatctgcccaagagcaggaccgtgaacgacctgcaccacgccaaggatgcctacctgaatgtggtcgtgggcaacgtgtaccacgagagattcagcgaccggtggttccggatcgacgagcactacaacgtgcagctgaagaaaatctttgacagagcccagcggcacggcagcaccatctattggaatggcgaagccgacattgccaaagtgaagaaaaccgccggcaagaatgccatccatatgaccagatacgccttcctgcggaaaggcggcctgtttgatcagcagcctgtcagaaaggccaaaggcctggtgtctctgaagcacggcatggccacagagaagtacggcggctacaacaagcctagcgtgtgtggctacgtgctggccaagtatacagccgagggaaagaccgagatcatgttcgtgcccgtggacctgcggatgaaggatcaggccacacagaatatcgaagccctggccacctacacaatccacgagatcggaaagatcaccaatcaagagcccgagaaggtggaactgctgctggatggccggatgctgaaaatcaacacagccatcatggccgacggcgtgcgtatggctctggctggaaaagattctggcggcgctaatgtgctgctgagccctgttatggccctgacactgagcaagaagtgggaagcctacatcaaggccctggaaagcttcgacaaaaagcgcaccgtgaaccggaacattgtgctgaaccaggaccacgatggcatcagcgccccagacaatctggaactgtatagactgctgatccagaagatgaaggcttggcccttctgcaactaccccggcaaccaggtggaagtgatcgagacaggcgaaaaaatcttcaccaaggccgccattgccgaccaagtgacctgtctgctgaatatcctgcagctgatgggaccaggcagcggaggaatcgatctgtctgtgtgtggcggcaaaaagagcgtgggcagcaagagaagatccgccaagctgtccaactggaaaaagtactacaaagaagtgcggatcgtcgacgtgtccgccagcggactgtatgagaagatcagcgaaaatctgctcgagatgctgggatcc

SEQ ID NO: 306 - DNA, 4089 bp, synthetic construct
  misc_feature 1..4089: note = Synthetic sequence or unknown origin
  source 1..4089: mol_type = other DNA
ggtaccggcgcctattatctgggcctcgatatcggcacagatagcgtgggctatgccgtgacagatcccgcctacagcctgagaaagttcaagggcgagcctatgtggggcacccacctgtttgaaggcggacaagagtctgccgacagacggctgcaccggaccaacagaagaagaatcgatcggagacagcagagagtggccctggtcaacgagctgttcgccgaggaaatcagacggatcgaccccaacttcttcgtgcggagaaaagagagcgccctgtttcctgaagatacagcccatggcgtgcggctgttcgatggcggaggaatcacagacagagagtaccacagaagataccccaccatccaccacctgatcctggaactgatgaccagcaacgagcctcacgatgtgcggctggtgtatctggcttgtgcttggctggtggcccacagaggccactttctgttcgattttggcgccgaccagaccgacaggctgctgaattttggcgaggtgtacggcagcttccgggactatctgcaagagcagggctacagcatgccttggcctgatgccgtgtctgccgataccgtgctggaaatcctgcagatggatgccggcgtgggcaagaagaaagaggccttcaagatcagagtgttcggcggcaagaagcccgccaaagagggcaccgaggatttcccttatagccctgagggaatcgtgggcctgctgtctggcggaaaagtgaagcccagggacctgttcgacaaagaagcctacgagcagatggaaagcgtgtccctggatatgggcgacgaagagttcgacagaatcgtgtccgagctgggagatgacggcgaactgctgagacagctgagaagcctgcacagctgcgccaagctgatcgccaccatgagcaactgcagagaaggcgaccctgtgtgcatcagcagcagcaaggtggccatctacgagagacaccagaaggacctcgagctgctgaagagactcgtgcggaactactgccccaagcagtacaacgagatctttcggagagccgtggccgacaactacgtggcctatagcggcaatgtgcagagctgcagcgagaacgacaaaaagaaagtcaagcggatcaacaaagtgggcttcagcgagtacctgaagaagaagctgaagggcctgaaggtggaacccgccgataaggccgagtacgacagcatgatgaaccggctggaacactacagctttctgcccagacagcgggacaccgacaacagagttatccctcagcagctgtacagacaagagctggccgccattctggaaagagccgagggatacctgcctatgctgagagagaaaaacgccgacggcctgtctgtgtccgagaagctgctgtctatcttcgacttcagaatcccctactacgtgggccctctcgtgcggcatcctaatagcacagcctggatcgagcggaagcagggcaagatcctgccttggaacttcgaacagatggtggacctggacgccagcgagcagaaattcatcgacaagatgctgaacaagtgcacctacctgcctggcgaggacgtgatgcctgtgaatagcctgctgtacgagcggttcaccgtgctgaacgccctgaacaacctgaaagtgaacggcagagaaatccccgtggccgtgaagcaagagctgtacacccagctgttccaagagctgcctagagtgcccgtgaagagaatccgggaatatctcctgcagcacggctacatggccaaggatgaggaactgaccggcctggacagcacctttaagtctggactgcggagccaccacatcttcaagagactgcttggatctggcgccctgacagaggcccaggtggaagagattatcctgcacagagcctacaccgaggacaagagcagaatgggccggtggctgagatccacctatcctcagctgacagatggcgacgtgcagtacatcctgaagcagaaactcaaagagttcggccggctgagcagaaaactgctgacaggactgtacggcaccgagagagatagctacggcgacgcctactccatcatggaaatgctgtggaactccaactgcaacctgatgcagctcctgagcgagaagtacacctacgccgagcagatctccgagtactgcaaagagtactacagcgagcaccccagaaggctgaccgacagactgtcagagatgtacgtgtccaacgccgccaagaggcctatcttcagagccctggacatcgtgtctgacgtggtcaaagctacaggcgaggcccctgccaagatcttcgttgaaatggccagaggcggcacccctgaccagaagggcaagagaaccgacagccggaagaaacagctgctcgactgctacaagaaagtgaaggacgaggatgtgtcccagttcgtgaaggccctggaaaacatgggagccgaggtggacgatcggctgcaggataggaagctgtacctgtactacctgcagctgggcagatgcgcctacacaggcagacctatcgaactgtctagactggccgacggcagctacaacctggaacacatctaccctcagagcctggtcaaggacgacagcctgctcaacaacctggtgctggtggaaagcgaagtgaatggacagaagtccgacgcttaccccgtggacggcgacatcagaaagaagatgggcgccttttggtccatgctgaaacagaacggcctgatgaccgaggaaaagtacaggcggctgacccggccacatccttttacagccgatgagaagctgggctttatcaaccggcagctggtcgagacaagacagagcaccaaagtgatcgccgctctgctgaaagagagattccccaagaccgagatcgtgtacgtgaaagccggcctggtgtccgagttcaggcaagagtttggactgctgaagtgcagaagcgtgaacgacctgcaccacgccaaggacgcctacctgaatatcgtcgtgggcaacgtgtaccacgagagattcaccagcaagtggttcaggctcgaggaacactataacgtgcaagtgaagaaactgttcgccaagcctcacagccacggcggcgaatgttattggaatggcgaggccgatattgccagagtgcggaagaatatggccaagaacgccgtgcacctgacaagatacgccttcatcagaaaaggcgggctgtttgaccagcagccagtgaaagctgccgaaggcctggtggaactgaagaaagggctgctgaccgagaaatacggcggctataacaaggccaccgccagctgcttcatgctcgtcagattcgagctgaaaggcaagcgggaagtgatgctggtgccagtggaactgctcgtgaaggacagagtgctggacgacagaactttcgcccagcagtatgccgctcagaccgtggaaaagatcatcggcaagaaacctgagaacctcgaactcctgctgaatggcagacccctgaagatcaacaccgtgttcagcttcgacggcaccaagatggtgctggcctctaaggacaacggcggaaagaacgtgatgctgagccctctggttgccctgatgctggcacctgaatgggagcagtacgccaagcggctggaaagcttccagaacaagcagaagaacaacaagaacctgcagcctaacgaagttcgcgacggcatcaccggcgagaagaacgccacactgtacagaatcctggccaaaaaaatgggcgagtggcctttcaagcagttccccggcaatcagcaagagaatctcgagcgcggaggcgaagtgttcgagagcaaagagatcacagagcagatcacctgtctgatgaacatcctgacactgatgggccctggatctgcaggcgttgacttgagaggatgcggaggaacaggccaggccggaaagaaatctgccaacgccaagatcagcaactggaagtccagatacagcgacgtgcggatcatcgacgagtctgccagcggcctgtttagcaagacaagcggcaatctgctggacctgctgggatcc

SEQ ID NO: 307 - DNA, 4092 bp, synthetic construct
  misc_feature 1..4092: note = Synthetic sequence or unknown origin
  source 1..4092: mol_type = other DNA
ggtaccgccaagaagctgttccccaactactacctgggcctcgattgtggcacaggctctattggatgggccgtgaccgacctgaactacaacatcctgagattcaacggcaaggccatgtggggcatcagactgttcgaaaccgccgacagcgccaccgatagaagagtcgtgcggtgcaacagacggcggaaccagagaagaacccagcggatcgattggctgcaagagctgtttgccgccgagatcgccaagatcgaccctaccttcttcctgcggctgaacgagagcagataccacatcgaggacaagaccgagagacagcccaacgctctgttcaacgacttcaactacaaggacaaggacttcttcaagcgctaccccaccatcttccacctgagaaaagagctgatcgacggcaccgccagctacgacattagacacgtgtacctggccatccaccacatcctgaagaaccggggccattttctgttccccggcgaggatatggccagcgtgaagaatgtgacccctctgttcgagcaagtgaagagactgctggtggacgccttcgatgtcgagttcaactacgccgacatcgtggaaatcgagactgccctgagacagagaaaggccgccagcagaaaagagagcctgcagagacttctggccgcctccgatgatgtgctgctgaaggccatgatcgacaccatgaccggctacaagatcagcctgagcaagatgttccaggacgagaacctggccaatgccgagatcaccagcatcaacttcagcgagggcaccttcgaggataacaccgagctgctgcagaccatcctgaacagcgaccagtttgagctgctgaccgtgctgaagggcatctacgattggagcctgctggccaacatcatggaaggcttccagtacatcagctacgccaaagtgaaccgcttcgtggccaacaaagaggaactctgcaagctgaagcggctgatcaagacatacgcccctgataagtacgactccttcttctacgacaccgacaagccctacctgagcgcctacgtgggcagctacaagagcaatggcaagaaaaccgccgtgaacagatgcagcgccgaggactttaacaaggccgtggtcaagatcctggaaggcatgcccgacaccgtgaaagaagaacctgactacaccctgctgctgggcaaagccaaggatctgacactgctgcctctgctgatctccagcaacaactctgtgctgccccaccagatccacctgatcgagctgaaggctatcctgaagcagagcgagcggcaccatccatttctggcccagaaggatgccaagggcctgagcgtgtccgagaagatcatcaatatcctgagctacagaatcccctactatgtgggccccatcaccgacttccacgacgacaagatcaaccccaacaagttcgcctggatgacccggaaaaagaccggcagaatctacccctggaacttcgatgagaagatcgacattgagaagtccgccgagaagtttatcagccggatgaccaacaagtgcacctacctgcaggataaggacgtgctgcccaagaacagcctgctgtactccaagttcacagtgctcaacgagctgaacaacctgcggatcaacgagacacccatcagcatcgagcagaagcaggccatcttcgacgacctgttcaagacccaccggaaagtgacaaacaagaagctccacgactacctgatcacccaaggctggtacaacaagaatcaagaactgatcatcaccggcatcgacagcaacttcgccaacagcctgggctcctacatcgacttcaaggatttcatcgagacaaaggtgctgacccggaccgacgtggaaaacatcatccggtggatcaccctgttcggagccgaccggaagctgctgaaaaagcgcgtgaaagccaccatgggacagaagctgagcgaccagcagatcgataccatcatcaacaagtttcactataaggactggggccgactgagcaaagagttcctgaccgatatctttcacatggaaaagtccaccggcgaagtgaagtccatcatcaccatgatgtgggagacaaacaacaacctgatggaactgatgagccccagcttcgactacgccggccagatctctaacaacgcccctatcgagaagctggactacagcgtggtggaacagctgagcacaagcccttccgtgaagaggcagatttggcagaccctgctgatcgtcaaagaaatccagaaaatcatggggcacgtcccgaagaaggtgttcttcgagtttgccagaggcgaggaaaagaaaaagcggaccgtgtccagaaagaacaagctgaaagaactgtacagcaacatcaagagccccgataccgaggccaaagaactgctgcagtttctggatgccaccaccgacagccagctgagaagcgacaagctgtacctgtactacacacagatcggcaagtgcatgtacagcggcgaccggatcgacatcaccgatctgtacaacaccaacatctacgacatcgatcacatctaccctcagagcaagaccaaggacgacagcctggacaaccgggtgctcgtgaagaaagagatcaacggccacaagtccaacgtgtacccaatcgaggactccatccggatcaagcagcacgccttctggaaaaccctgtacgacaagaactacatcagcaaagagaagttcgagcggctgaccagaaatcaccctctgaccgatgaggaactggccaatttcatcagccggcagctggtggaaacccggcagtctacaaagatcgccgccaacgtgctgagcagattcttcggcgatagcaccaagatcgtgtactctaaggcccggaacgtgtccgacttccggaacgagttcgacctgaccaagtgccggaccgtgaacgactttcaccacgccaaggacgcctttctgaacatcgtcgtgggcaatgtgtacgacaccaagtttaccggcaatccgctgaacttcatcaagtctaagaccctgtacaacctgaccaccaagaaactgtttatggaccgggtcgagaaggcctgggaacctcagggcgaaaattctaccctgcagctggtcaagcacaccctgcagaagaacaacattctgttcaccaggcagcagattgagagaggcggcagcttcttcgacgcccaagttgtgaaaggcggctcctatcagggcctgctgcctaccaagatggccgacaaaaaactgcagagggcactgcagaacacccagaagaatcggaaagaaatcatcacagagtggaccgacaaatacggcggctacaacaagctgtccgtggcctacttcatcctcgtgaagcacaagaagggcaagaaagaagtcgtgtccttcgagcccatgctgaacctgtacaaggccttctgcaagacagaggccagcctggaaaactactgcacaaaagaactggaactggtcgagcctcacatcatcctgaaaaaggtcctgatcaacaccctgtttaagatcgatggcttccccatgcacctggccggaaaagccggcgagaaagtgaaagttcgacccgccgttcagctgtgcctgtccaaagaggatgaggcctacatcaagcggctgtccaactacaacgatcggcggctgaaacagaaagtcaaagagctgcagatcgagccccagtacgaccacatctcctgcgagcagaacatgatcctgtaccagcacctggtgcagaagtctaacgagcccatctatatcaagaggcctgccggccagtccaagctgctggaaatggccacaccactgtttgagcagctgtctatcgagcagcagagcctgctcctcctgcagattgtgaagtactttagctgcaccggcgataccgtggatctgaagctgcttggaggatctgcccaggccggcttcacactgattcccaagacactgcccaacaccaagattgccctgttcatcaatcagagccccaccggcctgtttgaacaagaggtgccaatcagcctgggatcc

SEQ ID NO: 308 - DNA, 4098 bp, synthetic construct
  misc_feature 1..4098: note = Synthetic sequence or unknown origin
  source 1..4098: mol_type = other DNA
ggtacccggaagaacaaatacggcgactactacctgggcctcgacatgggcacaagctctgttggatgggccgtgaccgacaccaactacaacatcctgaagttcaacgccaaggctctgtggggcatcagactgttcgaggaagccaaatctgccgccggaaccagactgtacagaagccagcggagaagaatcgacagagtgtcctggcggatcagcatcctgcaagagctgttcagcgaagtgatcgccaaggtggaccccggcttcttcatgcggctgaaagagagccggctgcggctggaagataagaaggtgcccctgaagtacaacctgttcatcgacaagaactacaccgacatcgacttctacaagcagtaccccaccatgtaccacctgagatacgccctggccaccagagaagagtgctttgatgtgcggctgctgtacctggccatccagcacattgccaagcaccggggacactttctgtttgccggactggatgcctctcctatcaccgacttccggaacatctacgacaagctggaagagtacatcaaagaggaactggaactggccgactggtcctgccagaacatcgataagatggaagaggtgctgagcaacagcaacctgaacgtgaccgccaagaagaaagagctggaaaagctgctgccccgggacaacaagaagtgcaaggccctgatcagcttcctgtctggcggcaaggccaagatgagcgagctgttcgacgacgagaacctgaagctgtgcgagaaggacagcttcggcttccgggacgacgacttcgagacaatcatgcccatcatcgaggccgacctgggcgatagaatcgagggcatcttcctgctgaagtccatctacgattggagcatcctggccaagatcctgggcatcaacggccagatccagaaccagaagtacaagttcatcagcagcagcaaggtcgacgtgtacaaccagcacagagaggacctggtcaccctgaagaagatcctgaagggcagcgtgcagtacaacaagatcttccggatgaagaaagaaggcagctacgcctactacatcagcggcaagcagagccaagaggacttctgcaagaccctgcagaaaatcgtgaccaacgaccagctgctgaagcggaagtctgagcaagtgaccagcttcgaacaagtgaaggacgccgaggacggcctgctgtatagaatcgccaatggcctggcctttccgaagcaagtcaccaaagagaacggcatcatccccatccaagtgaacctggtggaactggacgccatcctgcagaacgccgagaagtacctgcctttcctgagcgaagtggatgccgatggcctgaccatcagcgacaagatcaaggctatcgtgaagttcagaatcccctactacgtgggacctctggccggcagcaagtacagcaaagaaaagggcagatgctgggtcgtgcggaagaacgagaagatctacccctggaacttcgacaaggtggtggatctggaagcctgcgccgagaaattcatcatcaacatgacagccaagtgcacctacctgctgggcgaagatgtgctgcccaagaactccctgctgtactccgagttcatgatgcggaacgagctgaactctctgaccatcgacggcgagagagtgtccagcgaactgctgaacaaaatctacaaccacttcaccaccaagaacaagatcacgaagaagaatatcaaagagtacctcaagaccgagaacatctattgcgaggacatcggcggcatcgacgacgtggtcaagtccaacctgaagtccttcaaggatttctcccggatcttcggacaggactacgtcgtgtgccacaccaagcagatcgaggatatcatccggtggatcaccctgttctgcgacgaaaaggacctgctgagaaagaagatcatcagcgagtaccccgagatctctgccgagaaactggaagagatcaagaagctcaagtacaaggactggggcagactgagcgctgccctgctgaatggcgagaagattgcctacatcgacgattccaccggggaagtgatcaccatcatctctgccctgcggcacaccaacaagaacttcatggaactgctgtccaacagctgcgagtataagttcattgacaaaatccagaagtttaacaagagcgacgtgaacaccagcgagaatatcacctacaaggacgtcgagaagctgtacgtgtcacccgccgtgaagagatccatctggcagaccctgagcatcatcaaagaactgcagctgatcctgggacacgcccctaagaaagtgttcctggaaatggccagagagaagcaagagagccagagaaccatcagcagactgaaccgcctgaaagaactgtacaaagagtgcaaggacgaggaaatcttcctgagcagcagcctggaagaaaagaccgacgaggacctgcggcgggacaagctgtatctgtactacacacagctggggagatgcatgtacaccggcgagaggatcgagatcagcgacctgttcaatgacaacctgtacgacatcgatcacatctaccccagatccaagaccaaggacgacagcatcgacaacagagtgctcgtcagaaagaacatgaacagcaagaagtccgacaagtacccgctgaatgagaacatccggtccaagatgcgggccttctggaaggatctgtacgagagaggctacatctcccagaagaagtacgagcggctgatcagagtgaatcccctgaccgatgatgagctggccggcttcatcaaccggcagatcgtggaaaccagacagagcacaaaagccgtggccgagctgctgcagagctacttcggcagcgacaacgtgatcttcagcaaggccggcaacgtgtccgactttcggcagaagtacggctttatcaagagccgggacgtgaacgacctgcaccacgccaaggatgcctacctgaacatcgtcgtgggcaacgcctattacaccaagttcacaaagagccccatcaactacatcaagaacaaccacgacttcaagtactcactgaaccccgacaagttctacaacttccccatcgaacgcgctggcgtgatagcttgggttccaggcgaggatggaacaatcgccatcgtgaagaaaatgatgagcaagaacaatatcctgttcacccggatggccgtgcaaggcaagggccagatcttcgatcagaatcctgtggccaaggccaaagacaagtggcctctgaagcagggcctgcctactgaagtgtacggcggctacaatagcctgaccacctcctacttcgctctggtggaaagcctgggcaagaagggcaaaaagcagcggagtctggaagcagtgcccattatcttcgccgacaagcagaagaacgtcatcgagaagtatctgagcaccaactccaacctggtcaaccccaagatcatcctgcctaagatcagaaagttctccctgctctacgtgaacggctaccccatgcatatcgcctcttgcaccggaaagcagatcaccttctacagcgccaggcagctgattctgcccgacgatgaagtgacctacgtcaagagcatcttcaactgcgaggaaaagatccagtacaacgagagcattatctacgacctccagaaggacgagacaagcaagcagattgccaaaaagcggctgcagtactacgaggatagattcggcatctccagagtgcgcaatctgaaactgtatcagctgctggtggctaagtgcgccgataagagcttctacaacaggcccgccagccagtatgagaatctgaagaacaacgaggacgtgttcgccagcctgaagctctttgagcagatcaaggtgctggaacagatcttcaagctgttcaagtgtggcagcgccagcgccaatctgaagctgcttggactgggcgcctactgcggaatccctaagatcggcatgaccctgaaggacaagacccagatcattctcgtgaaccagagcgtgaccggcgtgttcgagcaggccatagatctgctgtctgtgggatcc

SEQ ID NO: 309 - DNA, 4098 bp, synthetic construct
  misc_feature 1..4098: note = Synthetic sequence or unknown origin
  source 1..4098: mol_type = other DNA
ggtaccgagaacaccgagtactacctgggcctcgatatgggcacatcttctgttggctgggccgtgaccgacacacactatagactgctgagagccaagggcaaagacatgtggggcatcagagagttcgacagagccgacaccagcgtggacagaagaacccacagaatcagccggcggagaaggcagagagagctggccagaatcggcatgctgaaggactacttccacgacgccatcagcaacgtggacccctacttctaccagcggctggacaacagcaagtactacgtcgaggacaaagaggaaaacgtccggaacaagaacggcatcttccacgatgagaactacagcgacgtggactactacaacgagtaccccaccatctttcacctccggaaagagctgatcgagaacagccagcctcatgacgtgcggctggtttatctggccctgctgaatatgttcaagcaccggggccactttctgaacgccggactgtctcagggcacagacacacagagcatggaaagcgcctaccagcagctcctgatgctgctggaaaccaccttcatcgacaaccaggacctggtggtgttccccgacgctcccgattacagaaccatcgaggacatcctgagcaaccgggactacagcagaaccagaaagtctgaggaactggccgccttcttcaagatcgagaagaaggacaagaccgccttcgcctacgtgaaggccatctgcggactgaaggtggacgccaagctgctgttccccaacatcgaggatgaggaaaagaagatcgacatctgcttcagcgagtacggcttcgaggataagatccaagagatcagcgacgccgtgggcgaagagaactaccagattgtggaagccctgaaagccatctacgacatcggaagcctggccggcatcatgaagggctactcttacctgtctgaggccagagtggccgagtacgagaagcacaagagcgacctggccagactgaagtccgtgatccggaagtacaagacccctgaggaatacgacaagatgttccggcagaaagagcccggcagctacagcgcctatgtgaactctgtgaacgccgacggccagcaggttttcggcagacggaatatgaaggaacgcaagagagaggacctgtacaagacaatccggcagctgctgaaagacgtgccccagaacgaggacgtgacctacatcctgaacgagattgagaaagagaacttcctgcctaagcagctgaccgccagcaacggcatcatccctaatcaggtgcacaccagagagatggccaagatcctgcagaacgccgagaactatctgcccttcctgaatgagaaggacgagagcggcctgaccgtgtctcagagaatcctgaagctgttcacgtttcagatcccttactacgtgggccccgtgtctcccaagtctgagcagaatggcggcaatggctgggttgtgcggaaggccgatggaaaggtgctgccctggaacatcaacgagaagattgacctgaaggccaccagcgagcggttcatcgagagactgatcagaaactgcacctacatctccgacgagaaagtgctgcctaaggccagcctggaatacgaggccttctgcgtgctgaacgaaatcaacaacctgaagatcgatggcgagaagatcagcgtggaactgaagcaagagatctacagagagctgttccagcggggcaagaaagtgaccaagaagcagctggtcaacttcctgagctgcaagggcatcctgaaagaggaagcccagctgagcggcatcgacaatgagatcaacaacagcctgagcacctacggcaagttcaaggccattttcggcgagaagctggaagaggacgagtgcagacacatggtggaagatatcgtgcggtggtgtaccatctacggcgacagcaagagctttctgaaagagcagctcgaggaacgctacgccgacaagatcagccccgagaacatgaagcggatcttcggcttcaagtttaaggactggggccgactgagcaaagagttcctggaactgagcgcctgcgataagagcacaggcgagaaggtgtccctgattcggaccatgtgggacaccaactacaacctgatggaactgctgcacagcgagaattacaccttcgacgaggccctcaaagagaagcagaagaagggcgtcagactgctgcaagagatggaacccgaggacctggacgagctgtactttagcgcccctgtgaagagaatggtctggcagacaatcctgatcatccgcgaaattgagaaggtgctgggcagcagccccaagagactgtttatcgagatgaccagaagcgacgaggaaaagggcgacaagggcagaaaggacagccggaagaaacagctgctggatctctacaagaacatcaaggacgagtctcgcgactggaaagccgagattgaagccgccgatcagaaaggatggctgcggagcaaaaaggtgtacctgtactacacccagatgggcagatgcatgtacagcggccagcctatcgatttcgaggccctgatgaacgacaatatctacgatatcgaccacatctaccccaggcacttcgtgaaggacgacaacattaacaacaacctcgtgctggtggacaagcggctgaacgcccacaagtccgacacataccctctggaagccagcatccggttcagcacagccaatatcgccctgtggaaaagactgctggacgtgggactgatcctgccagagaagtacagaaggctgaccggcagagaggccttcacagacgagcagaaagccggattcattgccagacagctggtggaaacaagccagggcacaaagggcgtgtccgacatcctcaaagaaatgctgcccgagacagagatcgtgtacagcaaggcctccaacgtgtccgagtttagacaccagaggggcctgcagaagtccagactggtcaacgatttccaccacgctcacgacgcctacctgaacatcgtcgtgggcaacgtgtactatgtgaagttcaccaagaatcccatcaacttcatccggaacgagtacgcccgggatgccaagaccttcaactacaatctgtccaagatgtttgaccgcgacgtggccaggggagaagaaattgcctggaaggcccaaacagaggaaggcgccggaaccatcgtgaccgtgaagaagatgctggccaagaacacccctctgctgaccagattcagcttcgaaggacacggcgccattgccaacgaaacactgtatggcgcctccaaggccaagaaggacggctacattcccctgaagtccagcgaccagagaatgctggatgtgaccaaatacggcggctttaccagcgcctctaccgcctacttcttcctggtggaacacgaagtgaagggcaagaacgtgcggaccctggaaacagtgcccgtgtatgagaaagacaagatcgctcaagagcccgaggaactgcagagatactgtgaacagaccctgggcctgattcaccctagcgtgcggatcagcagaatcaagatccagagcctgatgcggatcaacggctacaacgtgcacatcagcggccggaccggcaatagaattacagtgcggaatgccgtgtccatgtgcctgggccagaactggatcgactacatccatctgctcgagaagtaccgcgagaagcaggatatggacgagaaaatcaccgccgctgagaacatccggctgtacgatatcctgaccgagaaacacaccaaggctatctaccagaagagactgaaccccatcggcaagaaactgatcgacgccagagagaagttcgagcagctcaccgtggaaaagcagagcctggtgctgctgcagattctccaggccacacagattggaatcgccgtggccgatctgaccctgattggcgaaacagccaattccggcgtgatgctgttcggcaaaaacatcaccgcctttagcgagtgcaagctgatcaaccagagcgtgaccggcctgttcgagtcctctgtggatctgctgacagtgggatcc

SEQ ID NO: 310 - DNA, 4110 bp, synthetic construct
  misc_feature 1..4110: note = Synthetic sequence or unknown origin
  source 1..4110: mol_type = other DNA
ggtaccgagacagagaagtactacgtcggcctggacatgggcacaaattctgttggctgggccgtgaccgaccgcgagtatagaatcgtcagagtgaagggcaaagacttctggggcatcagagagttcgaagaggccaagacagccgtggacagacggtccaagagagtgtctagaagaaggcggcagagggctcaagtgcggagcggcctcgtcagatcttattttgaacctgccgtgctggccgaagatcccctgttctacatcagaatggacaacagcaagttctttgaagaggacaaggaccaagtgatcggcaagaacgccatcttcgacgacgaggactacaaggacgccgactactacagcgagtaccccaccatctaccacctgagaaaggccctgctggaagataccgtgcctcacgacagcagatacgccagaaaggtgtacctggccatccacaacatgttcaagcaccggggccactttctggaaagcggcctgagcgagaaagaatccatgaacagcatgaccatcctgtactccgagttcgtggaacaggtggacctggtgctggatctgtcttttcctagtggcgtggccgaggaaatcaaagagatcctgagcgacagcggcctgtccagaagcgccaagtctgataagatcgccgaagtgtgccactttgacaagggcaacaagaaagagctgctgctgatcagagccatctgcggcctgaagctggacgccaagaaagtgttcgacggcctggatgacatcgaggaaaagatcgagatcgagttcagcagcgccagctacgaagagaaggtggaagaactggcctctgtgctgggcgacgagaacttcgagctgatcgagattatgaaggacatctacgacaccggcatgctggccaaaatcctgcacgactaccagtacctgtccgagagcagagtggccctgtatgagaaacaccacgccgatctgaagctgctgaaagaggtgtacaaagagcacttcagcgaggatatctacgataagatgttcagaggcggcaaagagggcgccgaggacggcaaatactccgcctacgtgaacagctacaacaccgagaagctgaacgagacaggcaagcccatgagaagaaccgccgacagcaggaccaaagaggccctgtacaccagcatcaagaaggacctgaaagacctgaaggacgaccgggccgagtacatcctgaagcagatcgacaccgacaactttctgcccaagcagctgacacccggcaacggcgttatccccaatcaggtgcacagacgcgagatgaaggccattctgaagcaggccgagaagtacctgcctacactgagagagaaggacgattccggcctgaccaccagcgagagaatcctgaaactgttcagctttcaaatcccctacttcatcggccccaccaccgagaaaagcaaagaatgtggcggcaatggctgggtcgtgcggaaagaagaaggacagatcctgccttggaacattgaggacaagattgactaccagaaaaccagcgaagagttcatcaagcggctgatccggaactgcacctacctgagcaatgagaaggtgctgcccaaggccagcctgatctacgagagattctgcgtgctgaatgagatcaacaacatgaagatcgacggcgagcccatcagcgtggaactgaagcaagagatctacaccgagctgttctgcaagggaaagaaagtgacccggaagcagattgagaacttcctggccaacagaggctgcctgtctgagtctgctcagctgacaggcatcgataccgccatcaacaactccctgagcagctacggcaagttcaggggcgtgttcggcgagatgctggacaccgatgagtaccagaagattgccgagaacatcatctatctggccaccgtgtacggcgacagcaagaaaatgctgagagagtgcctgcagaaagagtaccaggacatcctggacgagggccagatcaagcgcatcctgggcttcaagttcaaggactggggcaagatgagccgcgagtttctggaactgcagggctgtgataccaccaccggcgaagtgaagtccctgatctctgccatgtgggacaccaacgagaacctgatggaactgctgcacagcgagcagttcaccttcggcaaagaactccaggccaagcagattaagcagctcgagagcctgaaggattttcaggccaacgacctggatgagttctacttcagcgcccctgtgaagcggatggtctggcagacaatcctgctcatcaaagaaatcatcaaagtgatgggcaacccgccggaaaaggtgttcatcgagatgaccagatccgaggaagagaagaaaggcgaccagggcagaaaagccagcagaggcaaacagctgctggaactgtacaagaccgtgaagaacgaggaacgcgactggaagaaagagattgagagcgccgacgagagcggcaagctgagaagcaagaagctgtacctgtactacctgcagatgggcagatgcatgtacaccggcgagcctattgagctggatgagctgttcagcaccaaatacgacatcgaccacatctaccccagacactacgtgaaggatgacaacctgtccaacaatctggtgctcgtgaagaaagaaagcaacgcctacaagagcgacaactaccctctggtggaaatgaagcccgaggtgtaccagctgtggaagctgctccacgccaaaaagctgatctccgatgagaagtacagacggctgaccggcaagaatcccttcacagacgagcagaaggccgactttatcgccagacagctggtcgagacaagccagggaacaaaaggcgtggcagacctgctgaagcaactgctgcctgagaaaaccaccgtggtgtacgccaaagccagaaacgtgtccgacttcagaagagacaacggcttcttcaagagccggatcgtgaacgacttccaccacgccaaggatgcctacctgaacatcgtcgtgggcaacgtgtacttcaccaagttcacccagaatccgctgaacttcatcaagagggaactcgccatggaccagaagaagaaccactacaacctgggcagaatgttcgactggaacgtggaaagaggcggcctggttgcctgggtcgccagaaatgaggaaaagggcatcgagggctctatcgccaccgtgcagaaaatgatggccaagaacacccctatgatgacccggctgagctttgaaggccacggcggcatcaccaaagaaacagtgcaccccagcagaaaggccaagaagggcatctacttccccatgaagaccagcgacgagagactggccaatgtggaaagatacggcggctactccgatatcgctaccgcctacttctttgtggtggaacacaccatgaagaaagagcgcgtccggaccatcgagagcgtgccagtgtatctgagcaaggccgtggaaaacaaccccgacaagctggaagagtactgcgtgaacgtgctcgagctgaaagaaccctctgtcagagtgcggaagatcagaatccagagcctgatgcggtacaacggctacgagatgtatatcagcgggaagatgaacggcggcaagtactacaccctgtggaacgccaccaacctgtgcctgtgccaagagatggtcaattacgtgaagtctctcgagaagtatggggacgagaagatcgtgtccgataacatctgccgcgagaagaatatcgagctgtacaacgagctgcgcgagaagcacgacacaggcgtgtactctagaaggcccgtgcctatcagcaagatcctgaacgatggcctcgagaaattcgagaagctcgaaatcgagaaccagtgcaacatcctgctgggcattctgaaactgagctacatcggcacccctaacgccgacctcgaggatattggcggcaagaaaaacagcggcaagatgtacattagcaagatgatcacagagaagaacgcccctgtcatcgtgaaccagagcgtgaccggcctgttcgagaacaccatcaacctgatgaccgtgggatcc

SEQ ID NO: 311 - DNA, 4116 bp, synthetic construct
  misc_feature 1..4116: note = Synthetic sequence or unknown origin
  source 1..4116: mol_type = other DNA
ggtaccgagcagaacaccaagaagctgttcatcggcctggacgtgggcacagattctgttggatgggccgccaccgacgagtacttcaacctgtacagactgaagggcaagaccgcctggggagccagactgtttctggatgccgccaacgccaaggacagacggcagcatagagtgtctggaagaaggctggccagacggaaagagcggatcagactgctgaacgccctgttcgaccctctgctgaagaaggtggaccccaccttcctgctgagactggaaagcagcaccctgcagaacgacgaccccaacaaggatcagagagccgtgtctgacgccctgctgttcggaaacaagaagcacgagaaggcctactacgccgcctttcctaccatctggcacctgagaaaggccctgatcgagaacgatgacaaggccttcagcgacatcagatacctgtacctggccatccaccacatcatcaagtaccggggcaacttcctgagacagggcgagatcaagatcggcgagttcgacttcagctgcttcgacaagctgaaccagttcttcgacatctacttcagcaaagaggacgaggaagaggtcgagttcatcggactgcccaacgagaactaccagcggttcatcgactgtgccgccgacaagaatctcggcaagggcaaaaagaagggcgacctgctgaagctgatgagcttctccgaggacgagaagcccttctgcgagatgttctgttctctgtgtgccggcctggccttctccacaaagaagctgaacaagaaagacgagacagtgttcgaggacatcaaggttgagttcaacggcaagttcgacgacaagcaagaggaaatcaagagcgtcctgggcgacgcctacgatctggtggaactggccaagttcatcttcgactactgcgacctgaaggacatcctgggcgccagcacaaatagactgtctgaggccttcgccggcatctacgacagccacaaagaggaactgaaagccctgaagggaatctgcagagagatcgacagaagcctgggcaacgagagcaagaacagcctgtaccgcgaggtgttcaacgacaagggcatccccaacaactatgccgccttcattcaccacgagacaaacagcagcagatgcggaatcgccgacttcaacaactacgtgctgcagaagattgagcccctggaaaacctgctgagcaagcagaactacaagaactggatacagctgaagcagctcgccagccagggtagactgctgcagacaatcgccatcagaagcaccagcatcatccccatgcagctccatctgaaggacctgaaactgatcctggccaacgccgagaagagagacatccccggcatcaaggatatcaaagagaagatcctgctcctgttccagttcaaggtgccctactactgcggccctctgaccgatagaagccagtacagcaacgtggtgctgaaggcaggcacccgggaaaagatcaccccttggaatttcgccgaccaggtggacctggaagagacaaagaaaaagttcatggaaggcctgaccaacaagtgcacctacctgaaagactgcaacgtgctgccccggcagagcctgatgtttcaagagtacgacgcctggaacaagctcaacaacctgagcatcaatggcaacaagccctctccagaggaaatgaacgctctgtttgacttcgccagcaagcggagaaagaccaccatgtccgacatcaagaagttcgagaagcgggccaccatgagcaaagaaaacgatgtgaccgtgtccggctggaacgagaacgacttcatcgacctgagcagcttcgtgtccctgagcggctttttcgacctgggagagatccacagcgccgactacatggcctgtgaagaggccatcctgctgaaaaccatcttcacagacgcccctcaggacgccgatcctatcattgccgagaagttccccaacctgaagcctaaccagctggccgctctgaagaagatgagctgcaaaggctgggctaccctgagcagagagtttctgacactgaaggccgtggatgccgacggcgaagtgatgaatgagacactgctgggcctgatgaaggaaggcaagggaaacctgatgcagctgctgcacagctccctgtacaattttcaggacgtgatcgactcccacaaccgggccgtgtttggcgataagtctcccaagcagatcgccaacgacctgatcgaagagatgcctcctcagatgagaaggcccgtgattcaggccctgagaatcgtgcgggaagtgtccaaggtggccaagaaacagcccgacgtgatcagcatcgaagtgaccagagagagcaacgataagaaaaagaaagaggaatggtccaagaaggccaccgaccggaagaagcagattgacctgttcctgaagaacctcaagaaaaccgaggatgtgaagcagaccgagagcgagctggacggccaggccatcaacgatatcgacagcatcagaggcaagcacctctacctgtactttctccagaacggcaaggacgcctacaccggcctgcctatcgacatcaatgacgtgctgaacggcaccaaatacgacaccgatcacatcatccctcagagcctcatgaaggacgatagcatcgacaacctggtgctggtcaaccgcgagaagaaccagcacaagtccaacgagttccctctgcctcgggatatccagaccaaggccaacattgagagatggcgggctctgaaaaaggctggcggcatgtccgagaagaagttcaacaatctgacccggaccacaccactgaccgaggaagaactgtctgccttcgtggccgctcagatcaacgtggtcaacagatccaacgtcgtgatccgggatgtgctgaagattctgtaccccaatgccaagctgatcttctccaaggctcagtaccccagccagatcagaagagatctggaaatccccaagctgcgggacctgaatgatacccaccacgccgtggacgcctttctgaatatcgtgtctggcgtggaactgacaaagcagttcggcagaatggatgtgatcaaggccgctgccaagggcgataaggaccacagcctgaacatgacccgctacctggaacggctgctcaagaaagtggatgagaacaagaacgagacaatgaccgagctgggcaaccacgtgttcgtgaccagccagagacacgactttctgctgacctacagattcgattaccaggacagcgccttctacaacgccaccatctacagccccgataagaatctgatccctatgcacgacggcatggaccctgagagatacggcggctacagctctctgaacatcgagtacaactgcattgccaccatcaaggggaagaagaaaaccacaagatacctgctgggcgtgccccatctgctggccctgaagttcaagaatgacggcatcgatatcaccagcgacctgattaagctggtgccccacaagggcgacgaagaggtgtccatcgactggaagaaccccattccactgcggatcaccgtgaaaaaggacggcgtggaatacctgctcgcccctttcaacgcccaagtgatggaactgaagcctgtgtctcccgtgttcctgcctagagaggccgccgaatacctggctagactgaagaaagccgtggaccagaagaaacagtttatctaccagaactccgccgagatcttccagagcaaggacaagaacaacgccctgcagtttggccccgagcagtctaagaacgtggcactgaaaatctacgccctggccgatgccaagaagtacgattactgcgccatgatcagcaagctgagggacgctgccctgagagccgaaatgctggattctctgagcagcgaggccctgttcaagcagtacaacgatctgatcagcctgctgtcccagctgaccaggcggagcaagaagatctccagcaagtactttagcaagagccggggagccctgctgcaggatggactgaagattgtgtccaagagcatcaccggactgtacgagacagagcggaacctgggatcc

SEQ ID NO: 312 - DNA, 4584 bp, synthetic construct
  misc_feature 1..4584: note = Synthetic sequence or unknown origin
  source 1..4584: mol_type = other DNA
ggtaccaagaagatcctgggcctcgacctgggcacaaattctatcggctgggccgtcgtgaacgccgacgatgaactggacaaagtgacaggcatcgtggccgctggcagcagaatcatccctatgacagccgacgagctgaaggcctttaacagcgccgataccagcaagcagagcaagtgtgccgccagaacacagttccggtccatcagaagaaacatcgagcggaccaagctgcggcggtctagactgctgagagtgctgaatgccctgggcttcctgcctgaacacttcgccagccagatcgacagatacggcaacctgatcgacggcaaagagcctaagctggcctggcacaaggatgcccagggaaagatgcagttcctgttcaaggcctccttcgagcagatggtgcacgagttccacaacgtgcaccctgagctggtggccaacaacaagctgatcccctacgactggaccctgtactacctgcggaagaaggccctgcggcagcggatcacaaaagaggaactggcctggattctgctcagcttcaaccagaagcggggctactatcagctgagaggcgaggacgatgacaaagagggcgagcgcaaagagttcatggaactgaaggtgctggacgtgaagcccgaggacaatcccaaaggcaagggcaagcagtggtttatcgcccagctggaaaacggcctggtgtacagaagcaccaacagcagactgcctctgtggcagggcaagaccaaagccttcatcgtgacctacaagctgaacgctgacggcaccatcaagaaggacaaagaaggcaacgactgctgctccatgaccatgcctcagagcgacgacgactggaatctgctgaaagaaaagaccaagaaggatatcgacaacagcggcaagaccgtgggcgagtacatctacgatgccatcctgagcaagcccgacgtgaagattagaggcggactcgtgcggaccatcgagcgcagcttttacaaggatgagctgcggcagatcctgtctacccagtgttctctgcacgacgaactgcacaaccgcgagctgtacgacaagtgcatcaacgtgctgtacgccagcaacgaggcctacagacagagcatcagcggcagagacttcgtgtacctgttcctggacgacatcatcttctaccagcggcctctgaagtccaagaccagcctgatcgccgactgtcctttcgaagtgcggcacgacaaggacggcaagaaaatccctgtgaagtgcgcccctaagtctcaccctctgttccaagagttccggatctggcagttcatggccaacctgagaatcctgtgccgcgagtgtgtggtggatggccacagcaagaccgatatcgacgtgacacagcagtatctgggcaccgagacacagcggctgaagctgttcaactacctgaacgacagaaagagcgtgaagcagaaggacctgctgggcttcatcttcggcaagaacgagacagagcggtacagatggaactacgtggacgaccccgacaaagagtacccctgcaatcccaccagagccgatatgctggccgtgctgaagaagctcgagaagctgacaggcacccacatcggactgctgcctacttggagagaaccttgtggaacccacgagggcgagatcaaagaaaccgatctgtggcacatcctgtacagcgtgaccagcatgagcgagctgaaagccgctctgcacacattcgcccacagaaacaacctgcctgacgagtttgtggacgaggccgccaagatcaagccctacgaaagagattacgccgcctacagcctgaaggccatcaaaaagctgctgcccctgatgagatgtggcgagatgtggtcctacgacaacatcgacagcgccaccagacagcggatcgagaatctggtcaacggcgagttcgacgagacaatcagcaacagagtgcgcgagaagtccatccacatcacaagcccctacgatttcaagggcctgcctcagtggctggcctgctacgtggtgtacaatagacactctgaggccggcaccgacgccaagtggaaaaccccagatgacatgcacggcttcatcaccaccttcaagcacggcagcctgagaaaccctgtggtggaacaggtggtgctggaaacactgcggattgtggccgacatttggcagcagcacggcacaatcgacgagattcacgtggaactgggcagagagatgaagaaccccgccgacaagcggaagcggatctaccagacaatcgatgccaacgagaaaacaaacgcccgcatccggtacatgctgcaggactttctgaaccctcagctcgagattgagggcgtgtcccctgatagcccctatcagcaagagctgctgaagatctacgaggacggcgcctttgccagcgatagcgacgtgccaaaggacatcatcgagatccgggccaagtacacccagaatgaggccagcaaaagacccagcgccaaagaggtggaacggtacaagctgtggctcgagcagagatacagaagcccttataccggccagaccattcctctgagccggctgtttacccgggactacgagatcgaacacgtgatccctcagagccggttcttcgacgacagcttctccaacaaagtgatctgcgagagcgccgtgaacaaactgaaggacaagctgctgggatacgagttcgtgaagaaacaccacggcgagatcgtggaatgcggcttcgaccggaaagtgaacatcctggaagtggacgcctacgagcggctggtggctaatatgtatgccgccaacaaggccaagcgggaaaagctgatgatggaagatatccccgacacctttatcgccagacagctgaacgactcccggtacatcagccggtatatcctgagcctgctgagcaggatcgtgcgggacgatgatgagcaagagtccacaagcaagcacgtcatcccagtgaacggcgccatcaccgacagactgaaacaggactggggcgtgaacaacaagtggaacgagctgatcctgcctagattcgagcggatgaacaagatcaccggcacacacgacttcacctacgtgaacaaagagggaaagctggtccccaccgtgcctatcggcatgatgaagggcttcagcaagaagagaatcgatcacagacaccacgccatggacgccatcgtgatcgcctgtaccaccagatctcacgtgaacctgctgaacaatgagagcgctcggagcggcaaccgggaaatgagatatgccctgtcctgcaagctgaggcggaagggcgacgttgtgattgacggcgtgaaaaagaccgtgttcaaagagttttatctgccctggaatagcttccccgacgacgtgctgagcacactgcagggcatcatcgtgtccttcaagagcaaagtgcggatcatccagaagtccaccaaccggtacaccagattcgtggaaaaggacggaatgaagaacaaggtggtggactggcaggacagcagcagaaacgtgacagtgcggaagtccctgcacaaggacacagtgttcggcctggtcaacatccggcggaagaaaattgtgcggatcgccagcgccgtggacacccctagcatgatcgtcaacaaagaactcaaggacatcgtgcaccgcctgatcgagaagtacggcaacgccgacagagtgaagaagcacctgaaggataacgccgtgatgtacagccagttcgacctgaacaaagtggaaatctacgagttcaccaacgccaccaaagaacccatggtggccacaagagccgacctggtgtccaagtttagcgacatctctggcaaagagagcaagatcctgcagaggatcgaggaaatcaccgataccggcatccagaaaatcctgctggcccacctggaagccaaccgggataatctggacttcgctttcagccccgaaggcctggtgcagatgaacgagaatatcgccctgctgaatggcggcgtgccacacaagcctatcgtgaaggctcggtttatggaacctctgggcatgaagcaccccaagggcaattctggctgcaagatcgcccagtacgtggaagctcagaagggcaccaatctgttctacgccatctacatcgactccaacggcaagcgcatcttctccaccattccactgattgagagcattgccctgcaagaagccggcctgtctcctgtggctacacaggacgagaacggcaacaggctgctgttctatctgagccctggcgatctggtctacgtgccaacagccgaagagatcgagatgggcatgatcgctgaggaaatcgacaagaaccggatctacaaggccgtgtctttcaacggcgcccaggcctttttcatcaagagcagcgtggccacctccatcatcgataagaaagagtacggcccgctcaacaaaatggaacgcagcatcaccgatgagatgatcaaggccatctgcatccccatcaaggtggaccggctgggcaacatcatcatgctgaaccccaagctgggatcc

SEQ ID NO: 313 - DNA, 4131 bp, synthetic construct
  misc_feature 1..4131: note = Synthetic sequence or unknown origin
  source 1..4131: mol_type = other DNA
ggtaccggcaagaagtactacctgggcctcgacatgggcaccaattctgttggatgggccgtcgtggacaccgactataagctgctgagagccaagggcaaagacctgtggggcgtcagactgttcgaagaagcccatacagccgccgagagaagaggctacagagtgtcccgcagaaggcggtctagagagatcgccagaatcggcatgctgaaagagttcttcgccgacgccatcgaggccaaagatcccggctttttcgcccggatcgaggaaagcaagttccacaaagaggaacggaacgagggcaacaagcagccctacgccattttcgccgataccggctacaccgacaaagagtactacgagcagtaccccaccatcttccacctgagaaaagagctgctggaaaagaaagaaccccacgacgtgcggctggtgtacctggccatcagcaacctgtataagcggagaggccacttcctggacgccacactgagcgagaacgaagagacagatagcatggtggccctgctggacggctgcatcagcaaaatggtggacctggaaatggaagtgcccgtgaacgtggacgccattgagctggaagaggtgctgggaacaaagggcgtgtcccggaagagaatcctggaaagcctgtgcaccatgtggggcatcgacaagaagaagaagtccctgtacgccctggccagcctgctgtgtggcatgagctgcaagatgatcgacctgttcggcgaggaagtgatcgacgaggaacacaagagaatcgccgtgtccttcagagacagcagatacgaggaaatcgtgtccgagctgcaggacgtgctgggcgacgatagattcgacctgatctgcgtgttcaaagagatccacgacaagggcatgctgtccaacctgatgaagggctacgacttcctgagccaggccagagtggccatctatgaagaacacaagctggacctgctgatgctgaagaaggtcctgaagaagtacgacgccaaagaatacgagaatatgttccggatcatgaaggaaaacaactacagcgcctacgtgggcagcgtgaacagccacgataagatcagaagaggcggcagcaagaaccgggaagagttcctgaaatacgtgaagaaagtggtgtccaaccagaccgtgtttcccagcgacgacgacgatgtgtgcaacatcctgcagagaatcgaggacgacatcttcatgcccaagcagctgacagccagcaacggcgtgatccccaatcagctgcacctgagagagatgagcaagattctgaagaacgccgagaactacctcgagtttctgaaagagagggacgagagcggcctgaccgtgtctgagaagatcctgcaggtctacaagtttcagatcccctactatgtgggccccattccttactgcatgagcggcaccgacgactacaacaacctgaccaagtaccacaacgtgtgggccgagcggaaagaactgggaaaagtgtgcccctggaacttcgaggaaaagatcgacatcaagaagtccgccgagaatttcatcatcagaatggtccgacactgcagctacctggccggggaaaatgccctgcctaagaactccatgctgtacgagaagttcatggtcctggacgagctgaacaacctgcggatcaatggcgagaagctgaccgtggaacagaagcagaacatctaccacgatctgttcggccagggcaagaaagtgaacatgaagtctctggccaactacttcgtgcggaacggcatcatccagaaggatcaggccgagtctgccgtgtctggaatcgatggcggctttagagccagcctgagcaccgtgggcaagttctatggaatctttggcgaggccgtgtaccacgacgagaacgtgaaggctatcgaggacattgtgttctggggagccgtgtacggcaacgataagaagatgctcaaagagaagatcaacgagaagtacaaggacaagttcagcgagcaagagctgaagcgcatcctgggcttcaagttcgaaggctggggcagactgagcagaagctttttcgaactggaaggcgagagcaccgaggacggcgtgtgcagaacttttattcaggccctgtgggagacaaacgacaaccacatggaactgatgagcagcaagtacacgtacaaagaagaactcgagaagaagctccagctggttgagaagcccctgaaagaatggaattttgaggacctggacgatatgtacatgagcgcccctgtgaagcggatggtctggcagacaatcagcattatgaaggaactcgaggatgtgctcggcaacggccccgagagaattttcgtggaaatggctcgcgaagagggcgagaagaacaagcggaccatcagccggaagcagaaactgatcgatctgtacaaggccatcggcaaagagggaaaagagtggtgcaaagaggtcgaaggcatggaagaggccagcttcaagaacagaaagctgtacctgtattacctgcagatgggcaagtgcatctacaccgagcagaatatcgacctgcacaccctgctgaccagcaacaccatctacgacatcgaccacatctaccctcagcactacatcaaggacgacagcctggaaaacaatctggtgctggccctgaaggattacaacaacaacgtgaaaaaggacatcgtgcccctgcctaccgagacacggaagaatagaagggcctactgggaagtgctgaaaaacaagggcttcatcagccaagagaagttctcccggctgacccggaacatcggcttcactgaggaagaactggccggctttatcaaccggcagctggtggaaaccagacagggcacaaagagcatcacccagatcctgaagcacgcttaccccatgagcgagatcgtgtttgccaaagccggcgctgtgtccgagttccggaagaagttcgatctgctgaaagtgcggtgcatcaacaactaccatcacgcccacgacgcctacctgaacatcgttgtgggcaacacctacttcgtcaagttcaccaagaatccctacaacttcatcaaagaggtggtcaagaaccctaacaaggtcgagaacaagtatcacatgggccaagtgttcgactggaacgtgtgccggaatggggagaacgcctggatcaaggataagaccatcgacaccgtgaaggccgtgctggggaaaaacagccctctggtcacaagatacgccaccgagtatcacggcggcatcacacagaaagtgaccatctacaaggtgtccccagagaagaaggacagctacatccccgtgaagatgcgggacgaacggctgaaggatgtgaccaaatacggcggcctgagagatgtggccattagcggctattccctggtcgagtacaaggtggacgacaacgtcgtgcggagcctggaatctatccccgtgtatctgggcagagtggaatctctggccgacgagacaatcgtggcctactgtcagcagatgctgcagcgcgagtacaaaaaaaagatcgtgtcctgcatccggatctgctacaagttcatccccagcgagagcctgatccggtacaacggctactactattacctcggcggcaagaccgaccggtacatctgggttcgaagcgccatcgaactgtgcatcgactccaagaaggccaagtatatcaagaagatcgagaaggccatcaagagcaacagcttcgaagagaagggccacgatggcaagagggtgctgagcgtgcagagcaatatcgagctgtggtcttggatcagcaacaagttcgtgaccggcatctatgccaagcagatcggcaccatcaagggcatcattgccaacagcgaggaacagttcatctccctgacactggaacagcagtgctacgtgatctacgagatcatcaagtacatcaacaccagcgacatgaccgacgtggccctgatcggaggaagctctaagtccggcaagatgcggatctccaagaaaatcaccgatgtgcgcgagattgtgctggtccaccagagcgtgacaggactgtacagagccgaagtgaacctgctgactgtgggatcc

SEQ ID NO: 314 - DNA, 4149 bp, synthetic construct
  misc_feature 1..4149: note = Synthetic sequence or unknown origin
  source 1..4149: mol_type = other DNA
ggtaccgagcagaactactacctgggcctcgacatcggcacaaattctgttggctgggccgtgaccgatagcagctaccacctgtgccagttcaagcacaaggacatgtggggcatcagactgttcgacgaggccaagacagcccaagagcggagaacagccagatgcgccagaagaaggctggaacggcggaagcagagaatcgacctgctgcaagagctgttcgccgtggaaatgaacaaggtggacgacaccttcttcatccggctgaacgagagccggctgcacctggaagataagatcgtgcctgctaagcaccctctgttccgggaagagaactacaccgacagagagtactaccaagagtaccccaccatcttccacctgagaaaggacctgatcgaggacaaggcccctcacgacatcaggctggtgtatctggccctgcaccacatcatcaagaaccggggccactttctgatcaccggcggcttttccgatgccaagagctttgccgccaccatgagaaacctgcaagaggccgtgcagaacgagttcgacttcgagctgtacctggatgagacaggcctggccgatttcgagagaatcctgcagagcagagatgacgccaagagcgtgaaggccaagaagctgctgggcctgttcagcttcacccacctggaaaacgatgaggccatgcggaagaaaaccatcgtggaccaagtgtgcaagttcgtgtgtggcatgaccggcgacgtgtgcaagctgtttgccatggatagcgaggaaagcggcctggaaaagaccaagttcagctttggcgacgcccagtacgaggaatctatcgccgatcaactggaaggcgccctgcctgagaagttctacgtgctggaatgcatgaaggccctgtacgactggtccatcctggctgatattctggccggcgaggactacatcagctttgccaaagtgaagcagtacgccctgcacaaagagaacctgaagcggctgcgggtgttcatgagaaagtactgcgacaagcacacccgcgagcagttcttcaatgcccaccagcaagagaagggcaacaccaagctgtgtaactacgccgcctacgtgggcagcgtgaagaagaacggcaaagaatactccgtggccagatgcagcgaggaagagttctaccagggcctgaagaaaatcctggaagccgtgacagtgacagccgaggatgccgccgagaaagagtatctgctgcaacacacccagctgcacacactgctgccactgcagagaagcaaggacaacggcaccgtgcctaagcagatccacgagctggaactcaacaagatcctggaacaggcctgccagtacctgcctttcctgaacgatacagacggcgagggcatcagcgtggccaagaaaatcaaggatatcttcaacttcagaatcccctactacgtgggacccctgagcgatagacatagagcccagggcgccaacaactggatgatcagaagagagggcagaaccgagcggatctacccctggaatttcgaacaggtggtggacatggaacagagcaacaccgccttcatcacccggatgaccaacaagtgtacctacctcgtgggcgaagatgtgctgccaaagcacagcctgctgtactccaccttcatggtgctgaacgccatcaatcctctgaagatcaagggctaccctgccaccgagctgcagaagcagaacatcttccggcatgtgttcctcaagcaccagaaagtgaccgccaaagagatcatcgagtacctgaatcaagaggaccccggcctgaagctgaccgaggatgatctgagcggcttcgacgagaatggcaaggtgtccatgagcagctatctggacttctggaagaaagtgttcggcgagagaatggccgagaacgccgttcaggccatggtcgaggatatcatcaagtggaaaacaatctacggcgacgacaagcagatgctgaagagaatcatccagcagcactaccccgaccagctgacagatgctcagctgaaagccgtggccggctttagatacagcggctggggcaatttctccaaggccttcctgaatggcatccagggcatcgacacagagacaggcgagacattcacaatcatcaaagccctgtggaacaccaactgcaacctgatgcagctgctgagcggcagattcacctttcagcagcagatcaccgagcacaacaaggcccagatcggcgagatgacccagatcagctacgagaacgtggtggaacctctggccgtgtctcctgccgtgaagagatctatctggcagaccgtgcagatcgtgcaagagatcaagcagatcatgggcgctgcccctcagaaaatcttcatcgagatggtccgagatgacgacagcaagggcaagaagaaaggccggacagccagcagaaagcagcagctcctggaactgtatgccgcctgtgaagccgacgtccgcgagtggtcacaagagatcgagggcaaagacgagcgggccttcaacagcctgaaactgtacctgtactacctgcagaaaggcagatgcatgtacaccggcgagaggatcgatctggacgagctgatgaagtctaacagcaagtgggacaaagaccacatctaccctcagagcaagattaaggacgacagcctggacaacctggtgctggtcaacaaagaagtgaacgctaagaagtccaacgagctgctgtccgccgagattgtgcagaaacagcggagcttctgggagaacctgctcaaagagggcttcctgtccaagaagaagtacgaccggctgacccggatcaacgacttcaccgaggaagaactgtccggctttatcagccggcagctggtggaaaccagacagtctagcaaggccgtgaaggacctgcttgagcagctgtaccctgataccgccatcgtgtctgtgaaggctggcctggtgtcccagttccggaaaaaggatctgtgcgagctgaagtcccgcagactgaatgatctgcaccacgccaaggacgcctacctgaacatcgtcgtgggcaacgtgtactacgagaagttcaccgccaatcctatccggtggatgaaggaaaaccggcggaccaactacagcatcaaccgggtgttcgagtacgacaccaagaaacgggacgagtggatttggcaggcccctcctaagaacgagcggggaaaagtgtgcagaggcgagagagaggaactgcttggcggcacaatcgatgtcgtgcgcgagacagtgcagcggaacagaatgtgctacaccgagtacacctactgcgagaagggcgaactgttcgctgccaatccaaagcacgtggaaagcgccaagattcccctgaaagctggactggaaccagagaagtacggcggctactacagccccaagtccagctatttcgccctggtggaatttgacgggaagaagaagggaacccgcatccggaatatcatcggcgtgcccatctatatcgccaacatgctgcctcacagacccgacgcatttctgcactactgcgaagaagtgaaaggcctggtcaacgtgaccgtgctgtacgccaagatcaagaagaatgccctgctgctggtggacggcttcccactgagaatcaagggcgagaacgagacagacatcatgttcaagcagaacctgcagctggtcctgagacagggcgacgccgagacagtttggagaatcgagaagtacctcgagaagaacaaggactacgccgtggacgagaaattcgatagcctgagcgacgactccatgatgcaactgtacgacgtgctgacagagaagctgcagacagtgtacagcagacggcccgctaacaagggccagacactggttgagaagagagaggtgttcgctaagctgaacggcaataccaaagccgtgatcctgaatgagatcctgacaatgctgagatgcgacaccgccaccacagccaacctgaagggcattgaggacaaagaaaacgccggcagcatcaagatgaagaaaagcaccgtgggcaagagcaagctggtgctcgtgaatcagagcgtgaccggcctgctggaaaacaggacagaactgggatcc

SEQ ID NO: 315 - DNA, 4152 bp, synthetic construct
  misc_feature 1..4152: note = Synthetic sequence or unknown origin
  source 1..4152: mol_type = other DNA
ggtaccgccaacgagaagaacttcctgggcctcgacatcggcagcaattctgttggatgggccgtgaccgacgagaactacaagatcaagaagtacaagggcaacctgatgtggggcgtgcacctgtttgatgaagcccagcagagcgccgaccggcggatgtttagaacagccagaagaaggctggaccggcggcagcaaagaatcgtgctgctgcaagaactgttcgccgccgacatcctgaagaaggacgagaatttcttcctgcggctgaaagagagcgccctgctgcctgaggacagcgagaaccggaagcacaacatctttttcgacgatgagaactacggcgacaaagagtacttcaacgagtaccccaccatccaccacctgatcgtggaactgatgaactgcgacagccctcacgacatcagactggtgtactacgcctgcgcctacattctggcccacagaggccactttctgttcaacgtggaaaaggacgacatcgagaagatcaccgagttcaagcccctgtacaagaagttctacagcgacctgaccgagctgtgcgagacacccgcctttgatgagaacgccgagatcatggaagaggtgctgaagaaacacatcagcgtgaccgccaaggacaaagagctgaagcagatcctgttcggcggcaaggtgcccaaggacatcgacaccattaagtacgagctgctgaccaagctgatctgcggcggcacagtgaagatgagcgagctgttccggaaagaagagtacagcgagctggaaaagaacagcatctgcgtgaagtccgccgatttcagcgacaccctggaatccctggaaagacagctggatgagctgcactttgccctgatcgccagcgtgaaggctatgtacgattggagcctgctggtggacatcctgcacggcgagacaatgatcagcaagagcaaggtggaagtgtacgaccagcacaaggccgacctgaaagaactcaagtacttcatcaagacctacctggacaagaccgactacaacgccatcttccgggacgtgtccgacaaggccaattacgtgtcctacgtgtacaacgcccctagcgagaacgaccggaacaagtataagaagtgcctgcaagaggacttctgcaagttcctgaagccttacctcgagaaaatcacacccaccgacgatgacaaagagagattcgaggaactcaagaagaagcgcgaggacaacgaactgtgccccaagcaagtgacaaccgacaacagagtgatcccctaccagctgtactatgccgagctgaaaaaaatcctcgagaacgcctgcaagtacctgcctttcctgaacgagaaggatgagtacggcaccgtggccgagaagattctgaagattatggaatttcgcatcccctactacgccggacctctcgtgggaagagagaagtctgataacgcctggctgaagcggaaggccgacggcagaatctacccttggaatttctccgagctggtggatgaggacgagtccgagaacgagtttatcagacggatgacctgcaagtgcacatacctggctggcgaggacgtgatccctaagtactccctgctgtactccaagttcatggtgctcaacgagatcaacaacatcaaagtgaacggcgagctgatctccgtggaagccaagcagaagctgtaccaagagaagttcgtggaaagcaaggcccgcgtgaccaagaagcggatcagggaatttctggtgtccatcggcgagtactccggcgacgttgaagtgacaggcgtggacgataccatcaagagcagcctgagaagctaccacgacttcaagcacctgattgactgcggcctgctgaaagaatttgacgtcgaaaagatcatcgagcggatcaccgtgaccaccgacaccaagagactgaagaactggctgaaacaagagtacccacagctgagcgccagcgacgtgaagtacatcagcaagctgaagtataaggactacggccggctgagcagacggttcctggaagagatcatccccatcgatgccgatacaggcgaggtgctgggcgacaacaatatcatcacagccctgtgggagacaaacagcaatctgatgcagctgctgagcatgggcaagggctacagcaaggccattgagaagttcaacaacaactacttcgatcagcacccggacgagaagtccatctccaagcggctgaagaatatgtacgtgccaaccgccgtgcggcggagcatcacaagaacactggatatcgccaaagagcttaagaccattctcaagaaggccccggacaagatcttcatcgagatggccagaggcgagggcgatacccctaagggcagcagaacaaagtccagacgggaccagatcacagagtacctggataacagcgacgccgagaacatcggagagctgagagagagactggaaaaaaccgacgacggcaggctgcgctctgagaagatctttctgtacttcatgcagctgggcaagtgtgcctacaccgagaagaatatcagcttcgacgagctggacgacaataccaagtggaacatcgaccacatctggccccaggccaagatcaaagacgacagcatcgacaacaaggtgctcgtggacagcaacgccaatggcgccaagggcgataagtaccccatcagcagcgacatcaggtccaagatgtctggcttctggcacgccctctacaagaaaaacatgatgtccgagaaaaagtaccagcggctgatgcggagcaccagcttcacagaggaagaactgagcggctttatcgcccggcagctggtcgagacaagacagtctacaaaggccgtggccaccatcctcaaagagatcttccctgagagcgagatcgtgtacgtgaaggccggcatcgtgtccgagttccggcaagagatggacatgatgaagtgccgcgagattaacgacctgcaccacgccaaggatgcctacctgaacatcgtgatgggcaacgtgtacgacacaaagttcacaaaggacccgctgaactttatcaagagcggcgagcggtacagcatgaagctgttcaagaaggaccagagcggcaagaagtctggactgctgaccggcgttgtgaagcggggcgataatatcgcttgggaccccgagacaagcttcgacatcgtgaagcacatgatgagcaagaactccatcagatacgtgcggtacacctacagacggaaaggcggcctgttcaaccagatgcctgagcggaagaaagccggcctggtgcctagaaagaaaggcctggatacagagaagtacggcggctacaacaacaccaccgtgtccagctttgccgtgatcaagtgcaagaccgatgtgatcatcatccctgtcgagctgaagtgctacaaccagttctttagcgacatcgacttcgccaagaagtatagctacgagaagctcaagtatatcctgccggacaaaaagtacaaaggcatcaccaaggacgatattgtgctgcccaccatcgactaccagaacaacgctggaatccggaccgccgaactgaagatcaactccatcgtggaagtgaactgctaccctatcagcctgtgcagcaaggacagcaagggcaagtacattatcgtggcctctccagtgtctctgatcgtcgataagaactccgagaattacatcaagaagattatcggcttcttcgagaaagagcccaaccgcaagatcaccagctataacaacatctccaaagagcacaacctggacatctacgacatcatcatgcacaagtgcggcgagaagcccttcaatatctggtccaagttcgccgacatggccgacgtgctgcagaagaagaggaacatcttctttgagctgagcgtcgaggaacaagtgaaggccctcaaagaaatcatcagcatcctgaaaagcggccgaagcgtgttctgcaacctgagctacctgaatgagagcaagcagagctgcatctctaagctgggagccgtgctgacaggcaacaagaaaatcaagtccgtggtcatcgtggatcagagccccaccggcctgtttgagaaaaagagcgtgaacctgctggaactgggatcc

SEQ ID NO: 316 - DNA, 4152 bp, synthetic construct
  misc_feature 1..4152: note = Synthetic sequence or unknown origin
  source 1..4152: mol_type = other DNA
ggtaccgagtactacatcggcctggacatgggcacaaattctgtcggctgggccgtgaccgacgtgaactacaacctgatccggaagaaaggcaaggacatgtggggcatcagagagttcgacgaagccgagtctgccgccgagagaagagtgcacagagtgggcagaagaagccaccagcggagccaagtgaatatcggcctgctgaaagagatcttcgccaacgctctggccgccgaggatgagaatttcctggccagactggacaacagcttctacaaggccgaggacaaggacgagaacctgaccacactggacggcatcttcgccgatgccgactaccacgacgccgactactacaaagagtaccccaccatcttccacctgaagtacgacctgatcatggacaaggtgcccaacgacggcagatacgccagaaaggtgtacctggctctgaacaactacttcaagcggagaggccacttcctgaacgagagcctgtctggatctgacgaaggcggcaaggatatctggaccgcctacgtggaactgtgcgacaccgtgtacgaagagttcgatatcgtgctggcccacgagtacgagctggaaaacaagttcagaagcgtgttctgcgacgccagcctgagcagatctagaaagcgggacatgctgatggacctgttcggcatgaccaagaaagagaacgcccagcagtacatgatcctgggcgccatctgtggcctgaaaaccgatctgctgaagctgctgagcatcgagagcgagcagaaggccgacctggaattttctagcgccggcttcgaggataagctgcccgagatctatgccatcatcggcgagagctacgccaatctgatcgagagcatgaagcaggtctacgatgctggcgtgctggctggaatcatgagcggagtggatgccgagggaaatcctatcgcatggctgagccaggccagagtgaccagctacaagaagcacaagaaggacctgcacatcctgaaagagtgcatccacaagtactgcgacgagaaagagtacaaccacctgttcagagagaatgccgacggcagctacagcgcctatgtgggcacagtgaacagcgagagcaaagtgcgaagaggcgaagtgctgcacgcctctaagtctggcgagagatatgccaacctggccaagcggatcaagaccgatctggaaccctacgccaacgacgagaacgtgcggtacatcctggacgagctgaaagccgagacattcctgcctaagcagctgaccttcgccaatggcgtgatccccaatcagctgcacgagcgggaagtgcggagaatcctggacaacgccagcaagtacctgcctttcctgcaagagaaggacgagtccggcctgaccaactccgagaagatcatccggctgttcacctttcgggtgccctactatatcggccccgtgtctcagaactacaaaggcaatggatgggccgtgcggagagccggcatggaaaagaaaacagtgtacccctggaacatggaagccgtgatcaactacgacgacaccagagaggccttcatcaccaagatggtccgagagtgcagctacattgccggcgagaaggtgctgcccaaagaatccatggaataccaggcctttatggtgctgaacaccatcaacaacatcaaagtgaaggacgaaaagatcagctgcgaactgaagcaggacatctaccacgatatcttcgagaagaacggccggatcacaaagaagaagatcctgacctacctgaaccagcggggcttctccgtggaagagaatgagcttggaggcatcgacgccgtgatcggctgtcagctgagcacctatagacggttttatggcgtcctgggcgacgacctgtctaaggattctgtgcggcacatggtcgaggacatcgtgttcaaaggcacagtgtacggcgactccaaggccatgctgaaggacatgatcgccgagaagtactccgatgagctgagcaaagaacagatgaagcgcatcctgggcttcaagtacagagactggggcaacctgagcaagcagttcctcgagatggaaggctgcaacaagcagaccggcgagatcacaagcctgatcagagccctgtgggaagataacctgaacctgatggaactgctgcacagcgacaagtacaccttcgccgacacactgaaagaaaagcaccagaaaaacatgaagtccctgaccgagttcaacttcgaggacctggaagagatgtacttcagcagccccgtgaagaggatgatctggcagaccctgctgatcatcagagaagtgaccgagatcctgggatgcgcccctaccaagatcttcgtggaaatgacccgcagcgaagatgagaagaagggcgacgccggcagaaaggactccagagagaaagagctgctggaactgtacaagagcatcaaggacgacagaagctgggacgaagagattaagaatgccggcgcttccggcaagctgcggagcaagaagatgtacctgtactacaagcagatgggcagagacatgtacaccggcctgcctatcgacctgaatgagctgttcgacgacaacaaatacgacatcgaccacatctaccccaggcacttcgtgaaggatgactccatccacaacaacctggtgctggtggacaagcggaagaacagcagaaagagcgacaactaccccatcgacaagtctatcagagaggacggcaagatcaccgcctactggcggatgctgcacgacaagaaactgatgaacgatgagaagtaccggcggctgaccggcaacagacctttcacagaggaacaagaggccgactttatcgcccggcagctggtggaaacatctcaggctacaaagggcgtgaacgacctgctcaaagaactgctccccaagaataccatcctggtgtacgccaaggccgtgaacgtgtccgagttccggaagcagttcgacttttacaagagccggaccatcaacgacttccaccacgctcacgacgcctatctgaacatcgtcgtgggcaacgtgtacttcaccaagttcaccgccaatccgctgaacttcatcaaaaaagagaagaaagaatatcacctcggccggatgttcgaccgcgacgtggaaagaaatggctatatcgcctggaaggccccgatctacgacaaagaaacaaagcggatggtggaacccggcgagtctctgacaaccgttagaaaggtgctggccacacacacccctctgctgaccagactgtctacaacacagcacggcgccatcagcgatagcacaatctgttctgccgccaaggctaagaaggacggctacctgcctgtgaaatccctgagcaaccccaagctgatggatgtgaccaaatacggcggcttcaacagcatcaagaacgcctactttttcctggtggaacacgaggtggacggaaagggcaaagacaagggcaagcctgtgaagatcagaaccctggaatgcctgccagtgtacaagcgggcttacgtggaatctcacgaggaaggcctgtaccagtactgcctggaactgggcctgaagaaccccagcatcaggatgaagaagattaagccccagagcctgattaaggtcgacggcttcccactgtacatcaccggcaagagcgagaatagattcgtcgtgcggaacgcctgcaatctggttctgggagcccagtggaatcagtacatccacgccatcgagaagtccaacctgtccggcaggatcagcgagaacatcacagtggaagataatgtgcggctgtacgacgaactcatgaagaaacacaccgaggatatctacgccaagcggcccaatagcgtgggagagatcctgaacaaaggcagagccaagttcgtggatctggacgtggccaaacaggtgtacacactgacccagattctgaacctgtctctgatctgcaacagcgccctggccgatctgaatctgattggcggctctacaaagaccggcgtggccagaatcagcaagagcgtgtccggatacaaagagttcaagctgatcaactgcagcgtgaccggcatgtttgagaaagaggtggacctcctgaaagtgggatcc

SEQ ID NO: 317 - DNA, 4191 bp, synthetic construct
  misc_feature 1..4191: note = Synthetic sequence or unknown origin
  source 1..4191: mol_type = other DNA
ggtaccagcaagggccacaagaacctgaacatcaccaaggtggtggaaaacggcatcgactacgacatcggcctggatatcggcacaggatctgttggctgggccgttgtgtctgaacacggcgtgctgctgaagagactgggcaagaatgcctggggcagcagactgtttgagtctgccgaaacagccgccgacaccagaagcaagagaaccctgcggcggagatacgacagacggaagcagcggatctacaacctgagagagctgattgctgctgacgtggcccaggtggaccctcacttcttcgccaagttcaatcagacccctctgatcgaggccgacagaggcctgtctgacagacacatcctgttcaacgacatcgattaccagcagctgttcctggtggaccccgagcacaacatccacgagaagaagtaccccaccatctatcacctgagaaagcggctggtggaagatccctgcaaagaggacatccggctggtctatctggccctgcaccacctggtcaagtaccggggcaatttcctgattgagggcgacctgaccgccgagaatgctaatgctctgcaggccctggaagccttcaaagaggccctgattccattctgcgaagccctggaaatcagcttcgacgagacactgttcgacgtggccgctctgaaccaggtgttcaccgatggcagcaagaccagacgggaaagacaagaggccgtgaacgagttcctgctgccttgcttcgagaaagaaagcaaggaccgcgtgaagaatctgagcctggccatgtttggctaccagacaacctgggacaagatcttcccattcgagagcgagacagcccagaagttcagcctggacaaagaggacaaagtcaccgccttcgtggacgaggtgctgcctgaggatttcgccgatgtgtttaccgctctggaaggcctgtacaacgcctatctgctggccggcatcctgaagggatctcaaggtggcacactgagcagcagcatggtcggactgtatcagcagcataagaccgacctgcacatgctgcggaacatcgtgaagaagtatagcaccatcgaggaagagacaggcagacggatcgagttcaacaacatgttcagaggccccagatacgccgacgggatgtacgtgaaaaatgccgccaagggctacaccggctacatgatgaacaaggtgtcccaagaggacttctacaaagaagtgaagaacctgctgagcggcttcaccctgacaagcgaagaggccaagtggtgggaagaagcccagaaacggatcgacgatctgaccttcctgcggaagctgagaaacagagacaacggcgccattcctcaccagctgcacctggaagagatgcgggccatcctgaaaaaccagggccagtactatcccacactggcccagaatgccagctacatcgagcagatcctgagcttcagaatcccctactttgtgggccctctgggcaaagagaagaaccctcagagagagaaagccttcggctgggccaaaagaaggcctggctttgagagcaccgagatcaagccttggaacattgaggaagtggtggacttcgaccaggccgccgaggactttatcaccaatctgaccggcgagtgcacctactactacggcaagtctgtgatccccaaggccagcctgctgtactccgagttttgtgtgcggcaagagctgaacaagtgcaaggtggccgccgacggcgaaaaagaaaccctgatggacatcgagacaatcgagggcatctaccagaacgtgttcaagcggtacagcaaagtgaaggtggacaccgtgcgcgagtacctgaagtctaccggcttcatcaacaccggctttaagggcacccagaaagagggcgagttcgccagctccatgaagtcctactgcgacttcagacgcatcctgggcagagacttcgacagctacgaggactacgagatggtcgagcagctgattctgtgggtcaccgtgttcgagaacaagaagatcctgaagcggaagatcaaccagacatacggccctgagggactgcaggtcctgacagccgatcaagtgaacaagatcagcaagctgagatacacaggctggtccaacctgtccagagagttcctgaccgagctgaaagtggactacaacggcagaaagctgagcatcatgggagccctgagaggcggaactggcagacccctgaatctgatggaagtgctgaagaaggactacctgggcttcgatgagctgctggaagaagtcaacgccgagtatctgaaggcccacaagggcttcatgctggacgagattccaggcagccctgccatcaagagaggcatcaatcaggctctgggcatcgtggatgagatcattaagctggccggaaagcctccacggcggattgtggttgagatggccagagaggaagtcggccaaggcaaaggcaagcggaccaactctagactgaagcagctcgaggaactgtacaagaatctgcagaacgacatcctgctgcaggacagcaaagaactgaagggcgaactgaaagagtacggcgacagactggacgacgatagactgttcctgtacttcctgcagcggggcaagtgcatgtactgtggcgagagcctgaaggtcgagaacctgagcagctacgatatcgaccacatcgtgccccagagcatgatcaaggacgacagcctgaacaacagagtgctggtgcacagcgagtgcaacaggcacaaggccgatatctaccctctgcctgccgacctgagatccaagaacgcctccagatggaaactgctcaaagaaggcggactggtcaccaccaaaaagtacaacaacctgatgcagatcaacgacacccggcagctgaatgccatggccaagggattcatcaaccggcagctcgtggaaacccggcagatcacaaagcacgtggtcacactgctgcagagcctgcacgaggataccaccgtggaaacagtgaaggccgagctgacacacagactgagagaggcctacgacctgcctaaagtgcgggaagtgaacgactggcaccacgctcatgatgcctacctggcctgtcaggtgtcccggttcattcacgagagattcaccggcatggccgaggacctggactacgactccttcagcagatatgcctacgtggtcaagggcgcccagcagtctaattctggcctggttgtgggcagcttcggcagagccagactgggagaatatgaggacgcctggaatggccctgccgaggtggaaagaatccagcaggcactgaacttcaaggactgcttcgtgtccaagaagctggaacggctgaaaggcgagttctggaaccagaccgtgtacagccccagaacacacagcgataaggccctgcctctgaagcagggcaaagaccctgatacctacggctactacatgagccccaacagcgcctactacgccctggtggaatactccgacacctccaagaagaagcctaagaccaagcgcgagatggttggagtgcccatcgacatcagctaccggatcgacaatggccacgatctgctgacactgcaggcctatgtggaagccatctttggcggcgaggtgcagatcctcagagcccctatctacaagtaccagaaaatcgagtggaacggcggcttctactacctggtgtccaacagcgagatgatcaacgccagacagctgtggctgcctcacgtgtacgttgactatctggcactggctcaggctgccctgtctcctgctgctagatatgccgacaagcgggacttcgaagagtggcccgagaaggatgagctgagcgaggaaatcttcaactacctgagcgagcagattaacaactactaccccagatatggcggcctgtacgacaagctgacatccgagaaagccgtgtctgccttcgagagcaagagccccgaggataagtgtaaagccctgatcgaaatcctgaacatgctccactgcaacgccaggactggactggctagtcttggactttctggcggagccggcagaatgaatatgctgaacctgtccgatcctaccatcgtgttcatcgacaccagcatcaccgggatgtatgagtccagcgccagctatgaggctggatcc

SEQ ID NO: 318 - DNA, 4260 bp, synthetic construct
  misc_feature 1..4260: note = Synthetic sequence or unknown origin
  source 1..4260: mol_type = other DNA
ggtaccaagcacaagtacatcatcggcatcgatcctggcgtgggctctctgggcatcagcctgagaaataccgagcggaatgccctgctggaacagatcgaagtgaccaacgtggacatcgtgcggagcggcgttgtgaagaatggcgagggcaaatacgtgtccttcgccgccgagagaagaggcttcagaaacacccggacactgtacagacaccggaagcggagaaagcaagagacactgaagctgctgatcaacgaggacgtggtgctggacgagaacatcaaacacgtgctgtgccctctgagcaaagaggaactggacaaatgggtccgatacgacaacaacaagggctacaagagagagtaccccaccgacagcgtggaattttcccactggatgatgctggacttcaacaacgacggcaaggtggacgactacagcagccccttccagatccggaaagaactggtggaacggcagttcgacttcagccagaaagaggactgctacaagctgggcagagccctgtatcacattgcccagcggagaggctttaagagcagcaagggcagcatcaacgacagcgacgtgatcagcctgggcgacaaccaggacgacgatttcgactccctggaatactccgagaagaagaagtctaagaccctgaccgcctacatgaaccagctgcaagagaagggccacgagcgcgtgacagttggatttgccctggcctgcctggaaaatgatggcgtgcggctgagagatagcgagtaccaggccatcagaacccagctgaaagaggaaatcaccaccatcttcaagttccagaagcagctgagcctgaacagcaccctgtacaagagactggtgtctgagaagaaaaacgacgggaccatcttctatcagtgccccatcaagagccagaagggcaacgtcgagagctgcaccctggaacctcggaagaaacggtgtcaggtgtcacaccccgagttcgagaagtacagagcctggtccttcatcaacaacatccggatcaagctgctggccgacagcgaacctcagatgctgccttacgagctgcggatgaagctgttcgacaagatcaccggcaccgtgtccaagaccatcgactttatcggcatccggaagctgatcgagaaagaagtgggagagcccctgagcgccaacgagggcaccatcaatttcaaggacgattacagcctgagcggctgccctaccatcggcagactgagaaagatcctgggagatgactgggagacaaagacaatcgagatcgagcagacccggcggaggaacaagaatcaagaagtgaaggacctgcacaccatcagctacggcgccatcgatctgtggcacatctgcaccaccatggaaaacgagacagccatgaccgcctttctggaaaagaagatgcccttcgacgaggaacagaacaaagaaatgatgcggctctacaagaacgtgtccaacgactacgccaactacagcgtgtacgccctgcagaagatcaaccggttcctgatcagcggctgcaacaactacgaagccacactgctggccaagattcccgacatcattggcaagacccagtggaagcagtacggcaaggacatcgagacagacatccagaacctgatcgcccagaaccgggaagagaagagatacctggccattgccaaccagctgatcgccgactacaagtcccaggacgaggacgacagggaccacaactatgagtaccagctgaccgagctggattggcgcgacgtggaaaacaagatcaaagagagcatcggcaaagtcacctggacaaacatccccaccgaagaacagaacgccatcaagctgagagtgggcgagctgtaccagcagttcttcaagagctacaagcgggactactataagctgcccaacgacaccgagagaatccagagctacctgagcgagcggatctccctgaatctgcagaaggtgcagcagatctacacccctagcagcaacaagtactaccctccagctcacagagtgaagggcgtgttccaactgggctctcctgccaagattgccctgagaaaccccagcgccatgagaatcctgtacctgctgcggcggagaatcaacgagctgatgacccggtacagagacatggaacccgacaacaccagaatcgtggtggaactgcctagagagctgaacgacgccaacatgcggagagccatcgagctgtatcaagagcggcggaagaaagagaacaatatcttcaagaacatggtcggagaggtgctcgacgaaaaagaggaagaacgggtcgagaaaacccggctgctgattgagcaggcccctgagtacctgaacgccgacttcgatgagcgctaccagaagcacaaagaagtcaacagctacaaccggaactcctacaacgataccatcgagtacgccaccaccaagtacagactgtggctcgagcagggctgcatcgatatctacaccggccacacaatccctttcagccacctgttcgacgccaatatgtacgacatcgagcacaccattcctcggagcatcgtgctggaagatagcctcgagaacaagacaatcaccagcgcctttttcaaccagaaagtgaagggaaccctgctgcctagccagctgcctaactacaatgacgtgatcgtgcccaacctgcagccttggaaagaaagagtggaaaggctggacgaaagagtgcggtactggctgcgcgaaactaagagagccgccgactccgaccggaagaactactgtattgtgcagcggcacctgtggcagatggaactgaactactggtccagcaagctgaaccgctttctgatgaccgaagtgaaaaccgacttcgtgaacaagcagatgagcgacacccgcgtgatctccaaatatgtgtaccactacctgaagtcctgcttcagcagcgtggacgtgcagtatggctgcaccaacgccgtgtttcggaaaatcctgggcatccaggccaaggacgaagagaaggacagatccgtgcacacccaccacgccattgatgccaccgtgctgacattcatccccagcagcagcaagagatgcgagatgatgagactgttctttcagatcgacgaggccaagaaagccggcaacatcatggaagagaaacggctgaagaaacagctcgaagaggaaaagaacctctgcctgtacggccggaccaacaagaagcacagcgacaagaacctggccaacctcgtgcgggacatccaagagacaaccttcgtgaatcacagcgagagagatcaggccctgacaccagctaagcgcagaggcgtgttcagaaagaacggcaccacctacaacgtgctgaaaaccggcgactgcatccggggcaagctgcacaaagagaagtttttcggcgccattacacagtgggagaaagacgccgatggactggttgtcagagatgccatgggacagcatgtggtggacaccagcaacgtgaaatacgtgatccgcgtgaagctgcagtacaagcaaggcagaggcgagggcttcaagtcctgggaagaactgaaggcccggatgatcgacaagagcctgtacagaaagctggaagaacagcatcccaacgagacattcgtggaagcctgcaagaacggcttcttcaccatgcggaagatccacggcgagttcgtgcggaacagaatcagacacgtccgctgcgagatcagcgacaatcagggccacatcagcatcaagcagcacctgaacagaagcaagaaggattacaagcggttctactacgctgcccctgccgatctgctgtgtgcttgtgaatatcggggcgtcaaagaacagaaatacgagatgatgcgcctgtttgacatcagccaaaaccggaaggatggaaaagaggacatccctaccagcctgcagggcaagaaagaaatcctgcacctcgtcagagtgattcggatgggcgacatggtcatcctgtataaggacagccccaatgagctggacggcctcgacaaaaagcagctgtccaagcggctgtacagagtggacggctttgagaagtccggcagaatcatcctggtcaagcacgataagaccaaagaggatggcaagggcaagagctgcagcgacttcgaggacagaatctcccagaacatcatccgcatgagcatcaccaaagtgaagttcgtgcccctgatcaaccaccggggatcc

SEQ ID NO: 319 - DNA, 4269 bp, synthetic construct
  misc_feature 1..4269: note = Synthetic sequence or unknown origin
  source 1..4269: mol_type = other DNA
ggtaccagcaactacaacaacttcaagaagtacggcgactactacatcggcctggatgtcggcacaggatcttgtggatgggccgtgaccgacaccagctacaacatcctgaaggtgtccggcaagagcctgtggggcgtcagactgtttcctacagccgatacagccgccgagagaagatcccacagatgcgctcggcggagagtgttcagaaaccggcagagactgaacctgcttgagcagctgttcgacagcgagatctctaaggtggacgtgggcttcttccagcggctgaagaacagcgagttcaaagagatcagcaagaacaacctgttcggcgactgcacctacaacgacaaggacttcttcaaagagtaccccaccatctaccacctccggtacaagctgatgaacgagcccatcgacgatatccggctgctgtttctggccgtgcaccacatcatcaagcaccggggccactttctgttcgataacgtgaacaatatcggcgccagcctgcctgagctgtgggagcagtgttgtagccagttcgtggacatcagcctgttcagcaacctgagcgaggactacctggatatcgccgagagcctgaagcagaacctgatcgacatgcgggacgacgtgatcaatgtgatcaagaccagcagcgacaagaaggccgacctgaacaaagtgttcgcccagctgaagtccgtgtacgacgagatcagcgactacgaagtgaagaaaaccatcgagaaccgcgtgaacaagtggtccctgctgctgctgggatacaaagtgtctgccgtggaaatcttcagcatcgacgagagcgacgaggaaggcatcagctgcaagatccagatcaacagctccgactacgacgagcagctcctgaagatcaaggacgagtttaaaggcgtggtggaaagcgagaaggccgtctacgatgtcatcaaactgcaagagattctgaagggctgcaagagcatcagcgaggccaaagtgaagctgtacaacaagcacgccgaggaactgcggatcttcaagaacctgctgagagagcggctgagcgagaagattctgatcgaagtgaacaagaacgtgaaggtggccaacaacgagaagctgaccagcgatcccaagagcttctacaaagagattttcgaggaacgcaacaagaacaccgagaagggcaagatctgcttctactacgacatcacccacggcgacaagagcgccaacaaagaggccatcaagggcagcagcatctacaagagactgcagattctggcccagatcctgctgtgcagctccaagatctacaagctgtccgagaaagaaaaggtgctgctgcacagaatcggcgacctgagcatcttcgagacacaggtgtccgccgacaacagcgtgatcccctatcagatcaacctggccgagctggataagatcctgaaagtgcagagcaagaacttcgccttcctgtctgagaaggacgatgccggcgtgctggtgtacgacaaaatcaaggccctgctgaccttccggattccttactacgtgggccctctgaacaaccacagcaagttcagctggatcgtcaagaagtcccaagagaagattgtgccctggaacttcgagtccgtggtggacacagagaagtccgccgaggccttcatcaagcggatgaccagcaagtgtacctacctgagcggagaggacgtgctgcccaagaacagcatcatctactccaagttcatggtgctgaacgtcctgaacaacatccggatcaacggcatgagactggatgaggcccagaccggcctgaccaagaaagtgtttgacgagctgtactgcaaccagattaacgtgacccagaagcagctggtcgcctacctgtataacaacggcttcctgacctccaaagaggaactgaccggcttcgacgatgagcagaaagtgtccatgtccagctacgtcaagatcaagaacgccctgggcaccgacaacttcgacatcaactttgccgagagctttatcaagtacagcacactgttccccaacgactacctgatgatcgagaagaggctgaagcgcgagttcagcagcgagtgcgccaagttcaatgagaagctgtccaagctgtgccggatcaagtttagcggctggggcagactgagcgaaaagctgctgattggcctgatcggctataacaagaactctgagttcgacaagaatagcatcctgggcttcatgctgaacggcaagggcaacctgatggaactgctgtccagcgagtacaccttctccgacctgatctccagcgagaacagcaccctggacgagaacaacgccttcagctaccagaacctggtggaaggcctgtacgtgtcccctagcgtgaagagaatgatctggcagaccctgctggtcgtgcgcgagatcaccaaaaagatcatgggctacgagcccagccggatcttcgtggaaatggctagaggcgccactgccgaccagaaaggcaagcggaccaacagcagaaagaagtccatcctggctctgtacgataagtgccggcaggacttcgatatcagcgacctgtccagcaagctggaaaacgagaaagactccaagctgctgtccgataagatctacctgtactacacacagctgggcaagagcgtgtacaccggcaaagaaatcaagatcgacgagttcgacctgtacgacatcgatcacatcatccctcagagcctgacaaaggacgacagcctggacaacagagtgctggtcgagaaagagattaaccagaacgataagaagaaccggtatccgctgtcctccgagatccaagagaatcagaagcagttctggaagcacctcctggacctgggcctgattagcaagagcaagttcgagagactgatccgcagcaagcccctgagcaactctgagaaagagggctttatcgcccggcagctggtggaaaccagacagtctacaaaggccattgccggcctgctgagcaaactgtacaagaccgccaagatcatctaccctaaggccggactgaccgccgacttcaagcagagattcgatctgatcaaagtgcgcgagctgaacgacctgcaccacgccaaggatgcctactgtaacatcgtcgtgggcaatgtgtactacgagaagttcacctccaactacctctacgtgatcgaaaacaacgagccctactccttcagcacctccgacaagtcctacatcttcaccaagcagaacgagaaacgcctgagagagacaggcacctgggatagcagaaacggcaagtccatcagcatcgtgaagaagtactacaagcgcaacaatatcctgatgacctacaagcaagaggaacggatcggcgccctgttcaatcagacactgtatggccccgagaaaggcacaatccccaagaaaaagaacatgagctgccaggactacggcggctacgacagcgaccagaatagcttcttcagcttcatctcctacaaggacgataaggccaacctcaagaccaagctgatcggcatccctctgagagtggtgtacggactgtctgacaaggccagcgccatcagccactatctgctgacagagaaggccaacgagtaccgcgagcctaaggtgctgatcgacttcctgcctttcaacttcatcctcaaggacaacgagacaggcttcctggccagagtcgtgtcttttgcctctaagggcaaacagctcgagatcaagcagttcaaccctctggtgctggatgagaagaacctgaagcctctgaaggccatcgaaaagttcgtgtcccggctcaagaacaagtctatcaagattaagtacgagaaggacaagtccggcttcaccgacgaggacctgtcctctatctactccgagctgaaggataagtccaagaactccgtgttcaagaatctgcccaagccgattgtgaagatgctgagcgacgtggacattaacaactacaagtaccaagagtccgagaagtctgagcccaaactgctgaccatcgagcaaaaggccgtggccatctgcgagctgatcaaggcctttcacaccgagagcagcaatctgctgttcctgggagagaagaaaggctccggcgtgaagcggatcaagacagtgctggatctggaaaagaccgactacagcatcctgtgctccagcatcaccggcttttacgaaaaagagattcggctgcgggacctgctgaagggatcc

SEQ ID NO: 320 - DNA, 4416 bp, synthetic construct
  misc_feature 1..4416: note = Synthetic sequence or unknown origin
  source 1..4416: mol_type = other DNA
ggtaccaagaacatcctgggcctcgacctgggcacaaattctatcggatgggccctgatccagaccgacgatgagggcaagacctaccagagagacatcaagctgggcagcagaatcatccccatgacacaggatgtgctgggcgcttttgaaggcggagcccctattcagacacagaccgccagcagaacccagaaaagaggcatgcggagactgtacgagcggagagccctgagaagagaaagactgctgcgggtgctgcacattctgggctttctgcccgatcactacgaccactctatcggctgggaccccagacagaccaagaccttcggcaagttcatcaaccccgacgaggaacccaaactggcctggatgagagatgcccagggcaagcctagcttcctgttcaagagcagcttcgaggaaatgctggccgacttcaaggccaagcagcccgagatggtggccaacgacaagaagatcccctacgactggaccctgtactacctgagacagaaggccctgctgcagcccatcacaaaagaggaactggcttggattctgctcaacttcaaccagaagcggggctactaccagctgagaggcaaggacgagatcagccaggacgaggacaagagcaagatcgtcgagtacatcgagcaggtcgtgaccgacgtggacttcgaccccaatgagaaagagtccagcaaaggccggtggtacaacgtgcacctggccaacggcatgatctacagaaggcagagccagatcagcctgaaggactggatcggcaagaagagagagttcatcgtcaccaccgagctggacgatcacggcaagcccaagctgaacaaggacggcggcatcaagagatcctttagagcccctgaggccaatgattggaccctgagaaaagtgcggaccgagaacaacgtggaacagagcggaatgaccatcggcgcctacatctaccagcatctgctgaccgatcctagcggcaagatcatcggaaagttcgtggaaaccatcgaccggcacttctacaaggatgagctgaccgccatcctgaagaagcagagcgagttctaccccgagctgaaggaccaggccatgctggatgcctgttctaaggccctgtacggccacaacagcgccagacagttctccctgaagcagaaagacatggcctacctgctgatcgaggacgtgctgttctaccagcggcctctgaagtccaagaagtccctgatcagcaactgccccttcgagagccacacctacgtggacaaagaaaccggcgaagtgaagaaagagtacatcaagtgtatcgccaagagcaacccctacttccaagagtaccggatcagacacttcatgcagaacctgaagatctacgacacctccggcctggaagagaaggacgtgacagagcagtatctgcctgacgccgaggcctggaaaagactgtacaactggctgaacgagcgggacagcgtgaaccaggacagcttcctgaaggatttcctggccatcaagaagcccaagggcaaagacgccaagtacctgctgcggtggaactacgtcgaggataaggacaagaaataccccgtgggcgagacacacgccctgctgaagtcttgtctggaaaaagccggcgctgccaccagcctgctgaatgattttgccgtggaataccggctgtggcacctcctgtacagcatcgacgatgtgaacgagctgaaaggcgccctgaggaagttcgccagctgctacagaatcagcgacatcgacagcttcgtggaagtgttcagcaaggctaagcccttcgacaaggactacggcagctacagcgagaaggccattaagaaactgctgaccctgatgcggcagggcattagatctgagcaggcttgcgagcagctgtacgagaagaaacctgccgagcagtggacaagccctagcgacatccacgccttcatcaccgatttccagcagcacagcctgcggaaccccattgtggaacagtgcatcctggaaaccctgcggacagtggccgatatctggcagcagtgtggacacatcgacgagatccacctggaactgggcagagagatgaagaaccccgccgacaagagacagcagatctccaaccggaacagagagaacgagaacaccaacctgcggatcagagccctgctcacagagctgctgaacgacagcaatatccaggacgtgcggcctaacagccccatgcagcaggacatcctgagaatctacgaggaaggcgctctgacagagctgaagcccagcgatcccgagtacaaagagatccaagagatctccagactggcccagcctagcgtgtcccagctgacaagatacaagctgtggctggaacagcggtacagaagcccttataccggcagagtgatccctctggccaggctgtttacacccgcctatcagatcgagcacgtgatccccagggccagatattacgacgacagcctgaacaacaaagtgatctgcgaggccgaagtcaacaaggataagaccaatctgctggcccacgagtatatctgccagaacggcggcaagctgatcaccacaacaagcggcaccgtgaaggtgttcaacaaagaggaatacgagcagttcgtgcaggaccactacgccattctgaaaacaaagaagcggaacctgctgctcgacgacatccccgaagagtttatccagcggcagatgaacgactcccggtacatcagcagatacgtgaaagccctgctgtccaacatcgtgcgggccgacgagaacgatgatctggaaaccagcaagaacgtgatcgtgtgcaccggcagcgtgaccgatagactgaaaaaggactggggcctcgtggacgtgtggaaccagctgatctaccccagattcgagcggctgaacaacctgaccggcaccaatctgtttggccagtgggttaacaaggatggcaagcggtactttcagaccgacatgcccctggctctgagaaagggcttttccaagaagaggatcgaccacagacaccacgccatggatgccctggttattgcctgtgccaccagatccatcgtgaatctgctgagcaacatgaacgccaacaaaaccgagcagagagaggacctgaagcggacccttactggcaaaggcggcctgtttaacaagccctggcctacattcacccaggacgcttttcaggccctgagcgaggtggtcatctccttcaagaacaaagtgcgcgtgctgagccgggccagcaactactatgagcactatgacgccgaaggacggaagagacaggttgcccagaaaggcggaaagcagtttgtcgtgcggaagcccctgcacaaggaccatatgtacgcccacatcaacctgaggcggaagaaaagcgtgtccatcgacgccgctctgcaagaagtgcggaatatcgtcgacaccaagctgagaaaccggatcgtggacctgtttagccagggcctcgataagaagaagatcaagaaacagctggccgaagaaggcgtcggcaagcagatcgagatctatttcttcaccgacgacgtggaacccctggtggccatcagaaacaagctggacaagtcctttgacaagaaaaagatcctgagcatcaccgacaccggaatccagaagatcctgctggcctatctggccagcaagggcgataatcctggcgaggcattcagccctgagggaatcgccgaactgaatgagcacattgccgagttcaatggcggcaggcgccatcagcctatcctgaatgtgcgagtgaccgagaagatgggcgagaagttccaagtgggcgaaacaggcagcaagagccggaagtatgctgaggcccagagcggcacaaacctgttctttgccatctacgagagcgaaggcggcaagagaacctacgccaccattcctctgaatatcgccgtggaacggatcaagcaaggcctgggacctgtgcctgagaaggatgagatcggctgcaccctgaagttctttctgagccccaacgacctggtgtacgtgcccactgaagatgagatgctgcacaagaatatcgagatcgagagcctcgacaaagagcggatctacaagtttatcgactcctccgtgaccaccgccaacttcgtgcctcatagaagcgcatccctgctgtacgccctgcctaaggatgaagccgtgtccttctgcaagaccgacaagatcgtgcagaacgagtacggcatcggcagccctcagagcaagaaccagaagtccatcagcaacggcaagaataccgccgacatctacatcatcaagagcgtgtgctggaagctggaagtgaacagactgggccagatcacaaagatcatccggggatcc

SEQ ID NO: 321 - DNA, 4458 bp, synthetic construct
  misc_feature 1..4458: note = Synthetic sequence or unknown origin
  source 1..4458: mol_type = other DNA
ggtaccaagaacatcctgggcctcgacctgggcacaaattctatcggctgggccttcgtgtccaccaacgacgagggcaacaccatccagaatctgaagctgggcagcagaatcatccccatgagccaggacgtgctgagcaactttgatagcggcgtgaccaagagccagaccgccgagagaacaggctacagaggcactcggagactgagagagagatgcctgctgcggagagaaagactgctgagagtgctgcacattctgggctttctgcccaagcacttcgacaacagcatcggctggaacaaggacgacaacaagagctacggcaagttcatcgacgacagcgagcctaagatcgcctggtctaagaatgccgagggcaagatgcagatcgtgttcaccgaggccttcaacgagatgctggacgacttcaagtctcacaaccccaacctgatcaacggcggccacaaggtgccatacgactggaccatctactacctgagagacaaggccctgcggaagcccatctctaagcaagagctggcctggattctgctcaacttcaaccagaagcggggctactaccagctgagaggcgaggaagagtacgaggaagaaaacgagcagagcaagctgaagaagatcgagtaccacgagctgaaggtggacagagtggaaaccaccgaggaaagaagaggcgacgacatctggtacaacatctacctggaaaacggctggatctacagacggccctctagaatccctctggacgattggaccggcaagaagaaagagttcatcgtcaccaccgagtacaacgaggacggcagcatcaagctggacaaagagggcaacgagcggagaagcttcagagcccctaaagaggatgactggggcctgcagaagaagaaaaccgagagccagctggacagcagcaaccagacagtgggcagctacatctaccaccatctgctgtacaaccctaaggacaagatccggggcaaatacgtgcggaccatcgagagagcctactacaagcaagaactgaaagagatcctgaagaagcagagcgagttcatcaccgagctgaccaacagcaccctgctggaacagtgcatctgcgagctgtactccaccaacaaggcccaccaagagagcctgagaaagaaggacatcagctacctgctggtggacgacctgctgttctaccagcggcctctgaagtccaagaagtccctgatcagcgattgccccttcgagcagtacgagtacgccgataagaccaccggcgagatcaaggtgcagcacattaagtgtgtggccaagagcaacccctactaccaagagttccggctgtggcagttcatccagaacctgcgcctgtacagcaacagcgtggaagaacaagaagtgaccaacgactacctcaagaccgaagaggactacgtgcacctgttcaagtacctgaacgacaagaaagtgatcagccaagagcggctgctgaaggacttcttcggcctgaacaagcccagaggcaaggacaccgtgtttcccatccggtggaactatatcgccgacaagacatacccctgcaacgagacacggtccaagatgctgtctgccctggacaaggccaacatcagcaccgacatcctgaacgataagtacaccgagtatcgcctgtggcacctcctgtactccgtggaagatatcaatgagatcacaggcgccctgaccaccttcgccgaacagtatgatctgcccgtgggcttcgtggatgccttcaagaagatcagcttcaagaaagaatacggcgcctacagcgagaaggccgtgaagaaactgctgagcgtgatgcggatgggcagcatgtggtccgccgacgccattcctgacaacatccagaagatcatcaacggctccatcgacgagaaagtcaaagaacggatgagccaccagaacatcatcctggacgacatcagcaagttcaagggcctgcctgtgtggctggcctgttacgccatctatggcagacacagcgagagcaaggatatcaccaagtgggacacccctcaggacctggccaacttcatcaagaacttcaagcagcacagcatgcgcaaccccatcgtcgagcagtgtatcctggaaaccctgcggaccgtgtacgatatctgggttaagtacggccacatcgatgagattcacgtggaactgggccgcagcatgaagtccacagccgaccagagaaagcggatgaccgacaccaacaccaagaacgagaacaccaacctgcggatcaaagccctgctgatggaactgaagaacgaccccaccatctccgatgtgcggccacagtctcctatgcagcaggacattctgaaactgtacgaagagggcgctctgctgaacctggataagaacgacatcgacttcaaagagatcagcagcatcagccagaagtctagccccacacagagcgagctgacaaagtacaagctgtggctcgagcagaagtatcacagcccttacaccggcaaggccatcagcctgtccaagctgtttagccccgcctaccagatcgagcacgtgatccctcagggcagatacttcgacgactccttcaccaacaaagtgatttgcgaggccgaagtgaaccagcggaagtccaatatgctcggcatggagtttatcaagaagtgcggcggagagatcatccactgtcctaccattggcgacgtgaaggtgctgaccaccgacgagtataaggccttcattgccgaccactacgccagcaatcccatcaaggccaagaaactgatgatggacgatatccccgaagagtttatccagcggcagatgaacgacagccggtacatctctaaagtgattaaggggctgctctccaacgtcgtcagagaagaggacgaggtggacgctatctccaagaatgtgatcccttgcaccggcggcatcaccgacagactgaaagacgattggggcctgaagcacgtgtggaactccatcgtgtaccccagattcgagcggatgaacagactgaccaactccgaggatttcggccactgggagaacaaggatggcaagcgggtgttccagaccaaggtgccctttgagctgagcaagggcttcagcaagaagcggatcgatcacagacaccacgccatggatgccctggttattgccctggccacacggaacatcgtgtcctacctgaacaacgagagcgccagagacaccaagcggagagagaatctgagacagctgctgtgcgacaagaaccggatcatccggaagccttggcctaccttcacacaggatgtgtacgaggccctgcagaatatcgtggtgtcctttaagaactacgtgcgcgtgatcaacaaagccagcaactactacgagcactacgacgagaacggcgtgaaaaccaccattagccagaacagctccgagcagtgggccatcagaaagcctatgcacaaagaaaccgtgttcggcctggtcaacctgcagagaaagaaagaggtgccattcaacaaggctatcgagaggatctccagcatcgtcgacaaagagctgcggagcaccatcagagccatgatcacagccggcatggacgtgaacaagatcaagaaatacttcaaggaccagaactaccagttcgccggcaagcctgtgtccaaggtgctggtgtactactacaccgatgagaacgagagaatggtggccacaagaaagcccctggatgacagcttcgacgaaaagaagatccactccatcaccgataccggcatccagaaaatcctgctgaactacctggccagcaagggcaatgaccccaagctggctttcagccccgagggcatcatggaaatgaacgagcacatcacagactacaacagcggcaagaaccaccagcctatcgtcagagttagactggccgagccaaagggcgagaagtacaatatcggcaccaccaaaaacaagaacaaaaagttcgtggaagcccagtccgggaccaacctgttcttcgccatctacgaaaaagaggacgggacccgcagcttccagacaatcccactgaaccaggtggtggaaagaatgaagatgggctggacccctgctccagagcagaatgagaatggcgacaagctcaagttctatctgagccccaacgacctggtgtacgtgccctctgaagaggaaaggatgagcgactccgagctgatcaatcgcgagcggatctacaagatggtgtccgctacaggcggcagagccttctttattcctgtgaccgtggccagcgtgatcgccaacggaatcgagttccagagcacaaacaagattgagaacatcaacaacgtgtccatcaagagcatctgttggaagctggaagtggaccggctgggcaacatcaccaagattgtcagaggatcc

SEQ ID NO: 322 - DNA, 4461 bp, synthetic construct
  misc_feature 1..4461: note = Synthetic sequence or unknown origin
  source 1..4461: mol_type = other DNA
ggtaccaccaacatcagaaacgccgagcactacaacatcggcctggatatgggcacaggctctgttggatgggccgtgaccgatcaggatggcaacctgtacagattcaagggcaagcccacatggggcagcagactgtttacatctgccgaacctgccgccaccgccagaacatatagaggccagcggagaagatacgaccggcggagacaaagactgaacctgctccagcagatcttccagcctgagatggaaaagacagaccccgacttcttcgtgcggctgaaccagtccagactgtggaaggacgatccccagagattcggcgagtacacctggcctctgttcaacaagaagcaccctctgatcatcgacggcaaagaaatcaccgagcctgtgtactacggcatgttccccaccatctaccacctgagattctggctgatgcagcagaccaaccaggtggacatcagactgatctacctggccttccacaacatcgtgaaaacccggggcaacttcctgtaccaagacatgggaacagccctgaccgccaagaacgccgacatcagcaagagcatcgatgagttcgccgtggcctttgaggattggcagggcagcctggatgaggaatctcctctgaaaggcgccgtggtggacaccgatgttctcgaggctgctctgaacgacacacagaccagacgggccgagaaagaagaagtggccgccaaggcctttagcaccgacagcagcgacaagaaaaagatgggcaaagccttcgccgacgccttcatcggctataaggccaacctgacctacatcttcgacatcaaagaggacaacaaggacatcaagctgagcttcggcgacgaggaaaaggtggacgccgctaaagaactgctgggagatgaggacaagctgctgttcgaggccatgaacgccatctacagctctgtggtgctgcagggcatcctgcacatcaccaatgccgaagtgtactgggccagcggcatctttaaaaccgctctggccggcatggacatcgacgattgtgccgtgaccatctccaagtccaagatcatcgagtacggccggtacagagaagatctgaagtgcctgaagcagctggtcaagaagtactaccccaacgacgaagagacaggcaagaacagctccgagtacaagaccttcttcaaggggaaagagttctgcgaccccaagagcaaggtgcccgtgaagggacacaagcaccggcacatgaagtacgatcctgccacagccgagggctacaccagatatgatctgggcgccaaaggcggcaccgatatcagaacaaagtccggcgtgaccccttacgagcagttcaagaaggacaccctgagcatcttcagagtgaagtacgccaacggcaagctgaggcctctggatgagtctgctattgccctgaaagccgccgctgacgagtctatcctggaaatcgccaagagattcgaggaccagaccttcatgcggaagctgaaaaccagcgacaatggcgtgatcccctaccagctgcacctggaagagatgaccgccatcatcgaggtgcagaaggccagctatccattcctggccgaggtgtacacaacacatgatggcgccgtgcggaacaagatcaagagcctggtgtcctttagaatcccctactacgtgggccctctgacacagaagtctgccgccaaagacgccgagggcagaaacagatttgcttggagcgtccggcaggccggaaaagaaagcgccaaggtgtacccctggaactgggacgacgtgatcgacaaagaagccagcgccgacgcttttatgcaccggatgatcggcagcgacacctacctgtggaatgagcccgtgctgcctagatgcagcctgctgtacgagaagtactgcgtgctgaacgagctgaacggcgcccactacaaggacaccgacggcaacattagacggctggacgtgtccgagcggaagcagattttcgaggatctgtttatccacggcaagcacgccagcgtgtcctacagagatgtggaagattgggccaagaggcactgtcggagatatgccgaactgtctggcggccaagaagagaacggctttgagagcaagctgggcagctaccggtacttctgtagactgctgggcaccaccgacctgaacgactctcagagagagatggccgaggacatcattgagtggaacaccctgtttgaggaccgggacatcctgcgggccagaatcaaagaagcttacagcaatttcctgagcgacaagcagatcaaggacgtgtgcaagaagaggttcaccggctggggcaacctgagcaagaagctgctgaccggcatcaaagtgaagtccgatgagggccccgtgtccgtgatggatgtgctggaatacggctaccctaatgccggctgcagcgcctttagacatggggatgctatggtgctgatgcaagtgctgcacaacgagacactggacttcgaagagaagattaacgagatcaacgaggaaagcggagagggcagactgctgacagtggacgatctgccttatgcctctcctgctctgaggcggagcatcaaccagaccatgcggatcgtggaagaaatcgtgtctatcgccggctgcgcccctgagaacatctacatcgagagcacccgggacgaagatgagctgaccaagaaaggccggaccaaaaagcgcttcgagagcctgaatgcccagctgaaatgtctgaatggcgagcagctgaaggccggcatcatgaatgagctgaaagagaacgagtccaagctggacagcgacagactgatgctgtactttatgcagaacggcaagtccatgtactctggcgccgacctggatatccggaatctgagcagctaccagatcgaccacatcatccctcagagctacatcaaggatgacagcctggacaacagagtgctcgtgaaggccgacgagaaccagcggaagaaggatagcctgctgctggacgagagcatccggaagagaatgaagcctgtgtgggacgccctgcacaatgcccacctgatgtccgacaaaaagtactccaacctgtgctgcgacagcatctccgagagaagaatgcagggcttcatcagccggcagctggtggaaacaagccaggtggtcaagttcgccgctcagatgctggctcagagataccctcagaatagcgacggcacaggcaccagagtgtgtaccgtgaaagccggaatctctcaccagctgagacaagtgtgggacaacgaggccggaagatacgtgtggcggttccccaaagtgcgcgagatgaacgattaccatcacgcccacgatgcctatctggccaccgaagtgggcagattcatcagcatcagataccccgagagctacacaaaccccgttggcatggccaaggccatgagaacctacattaagcggagggccaaccagtacgccatcgatcacaaagcccctggccactcttttatcgccgccagcttcctggaaaatggctttgacaaagaaaccggcgtcgtgaccagggacaaatgggatgctgaagccgagctggcccggatgaccaagtacttcaacatccccgattgctacatcacccggatgcctgagatcacagccggcgctttttccgacgccacactgtacagccccagaaacaaagagaaatacgccaacctggccatgaggctgaagggcaatctggaaacccagaagtacggcggcttctccagagagcagttcgcctacttcttcatctacgagaagcaggataagaaaggcaggcggctgttctgcttcgagtccctgtctgtgtctagagccgacgaagtgcagagatatggcgtggccgctctggaaagattcgccaagaatctgctggcccctggcgagacattcatcagaatcgtgcggcctgctctgtacaagaaccagctcgtggaaatcgacggctccagagtgcttctgagaggtgccgctgaagtgcggaatgccacagaaatggcctttggcctgagcgaagctcggctgctggccgatattgccgatggcaagaccctgtccaagaaggatctgctgcggctgtacgacagatacaccgacaagatccagagatacgcccatgagctggatgagaagctgaacctgagagagcacagaagcgccttcgaggccctggattctgttcagcagcctcaggttctgctgcaggttctggccctgctgaatgccaagaccaatgccatcgacctgacaggcattggcgagtctgctcatgccggaaggctgcagtacaccttcaacaaactgctgaactccggcagattcgtggtcatcgatcagagcatcaccgggatgttcgagaacagagtgaccctgagacacgaggaaggcggatcc

SEQ ID NO: 323 - DNA, 4482 bp, synthetic construct
  misc_feature 1..4482: note = Synthetic sequence or unknown origin
  source 1..4482: mol_type = other DNA
ggtaccggacagatcctgggactcgatctgggcacaaattctatcggctgggccgtcgtggacaacgccgctcagaagattatcgccctgggcagcagaatcatccccatgtctgctgacgtgctggccgattacgagaagggcaccctggaaacacagatggccaagagaagaggcttccggggcacaagaaggctgtacgagagaagcaagctgcggcgcgaaagactgcacagagtgctgagaatcctgggcttcctgcctgtgcagtaccagcagcagatcgactttgagaagcaccccggcaagttcaaggacaacggcgtgccactgatcgcctacagaaaggatgcctacggcaagctgcagttcgccttcatcagcagcttcaacgagatgatcgaggacttcgccaagcaccagccttctctggtggccgatggaaagctgatccctcacgactggtgcctgtactacctgagacagaaggccctgaccaagcctgtgtccaaagaggaactggcctggatcatcctgaacttcaacaccaagcggggctactaccagcggatggaagaggaaagcgacaacagcaagatggaagtgtacaagcggctgaaggtggtggacgtggtggataacggcgtgaacaagcggagaaaggaccagcacgactacgtgatcgagttcgaggaaggcgtgaagaaaacaatcaccagccggtacatcccttacggcgtgggagatgagctgaacctgatcgtgtcctacaagctggacaaagagggcaacagacggaccgacgtggaacccagcaccagaatcgtgaacaacgagaaggattggaccctgctcaagaccaagaccgaggctgatctggaagccagctctctgacagtgggcgcctacatctaccagcacatcctgaatatccccagcgacaagatcagaggcagcttcgtgcggaccatcgagcggaagttctacaaggacgaactcgtgcggattctgaacaagcaggccgagttccacgaggaactgagagacagcgccctgtacaagaaatgcgtgaacgagctgtaccaccagaacgaggcccatagagccagcctggaaggcaagagcttcaccgatctgatcgtggacgacatcatgttctaccagaggccactgaagtccaagaagtacctgatcagcgactgccctctggaaagctacacctacatcgacaaagagacaggcgagatcaagcccaagagcgtgaagtgcatcaccaagagcaaccccatcttccaagagttccggctgtggcagtttgtgcggaacctgaagatctacgccaagcagcgggaagtgaatggcaagctgagactggactacgactgcaccagcgagttcatcaagagcgaggatgacgtggccagcctgttcgagtggctgaacgagaagaaagagatcgatcagacccagttcctgaagtaccccggcttcggcatcaagaaaaccgagctggataactaccggtggaactacgtcgaggacaagaagtatccctgcaacgagacacggtatctgatcatgagcagactgaagaaggtggacaaggctctgaccctgaccaccgacgagttttacaagctgtggcacattctgtacagcgtcgacgaccggattcagctcgataaggccctgtgcagcttcgccagatctatcgccgccgatgaggatgagttctgcagccagttccggtctacccctccattcaaggccgagtacggcagctactctcagaaggccattgccaagctgctgcccctgatgagatgcggcaagttttgggacgaagccgccatcgatgccagcgtgaaagagcggatcgattctatcgtggccgtgggcatcgagaaccagaaaatcatggaaagagtcaacgagcggagcatcagcctgagcagaatctccgacttccggtacatggaactgtggctggccctgtacgtggtgtatggcgacaaagccgacgtgcgcgaggacagaagatggaccacacctgacgacatcgactgctacctgcggttcaatctgaagcagggcaccatgcggaaccccatcgtggaacaggttgtgaccgagacactgagagtcgtgcgggacatttggaaggcctacggctctatcgacgaggtgcacatcgagctgggcagagagatgaagcagaccaaggaccagagactgaaaaccctggccagaatcaccgacaatgagaacaccaacatccggatcagagccctgctgcaagagttcacagaccccagctatggcgtgaaggatgtgcggccttacagccccatgcaccaagagaaactgaaaatctacgaggaagccgtgctggacgccgtggaagccgatgatgagatcaaggacattctgaagggcttccgcgagacagacgccagcaaaagacctagccacaaacaggtggaacggtacaagctctggctggaacagcactactgcagcccttacaccggccagcctattcctatgagcaggctgttcaccgaggactatcagatcgagcacatcatccctaaggctcggtactacgacgacagcctgtccaacaaagtgatttgcgagagcgaagtgaaccagctcaagtccaacatgctgggctacgagtttatcagagagaaaggcggccagatcatcggcaacggactgaagatcctgaacaccacacagtacgagagcttcattaaggacaactacagccgcaaccgggccaagatgaacaacctgctgctcgaggaagtgcccgagtccttcatcaaccggcagatgaacgacagccgctacatcagccgcgagatcatgcatatcctgagcaacctcgtccggaatgagaaggacgacgatgagcccgtgtccaagaacgtgatccctctgaacggcaaagtgaccaccgtgctgaagaaagactggggcctgaacgacgtgtggaatcagatcgtgtaccccagatttgagaggctgaaccggatcaccgagagctacgattatggcgagtggcggatggtcggaggcaagaaggttttccagacaagcgtgcccctggccatcagcaagggctttcagaagaagagaatcgaccaccggcaccacgccatggatgccctgacaatcgccctgactacccggaaccacatcaactttctcaacaacgtgtacagcggcagcgagggaatcaagaacagagaagccctgaagcgggtgctgtgcgacaagcaaaatggcgaatggctgttcaagaagccttgggagagctttacccaagaggcctttactgccctgagcggcatcatcgtgtctttcaagcagaacctgcgcgtgatcaacaaaatgaacaatcactaccagaaatacgtggacggccggaagcagtacgtgaaacagacagctggcgacagctgggccatcagaaagtctctgcacaaggcctctgtgtctgccgccgtgaacctgaaactggtcaagagcacaagactggccgacgctctgaagaacgattgggagctgatctgcgacaaagaaatcaagaaagccatcaaagagctgatcaaacagtacggcggacgcttcgacgccaaagtgatcacaaagtacttcaaggaccgggacttcaagctcaacggcaaggacatctccaaggtcgaggtgttctactacagcgacgagaaagagcccctgagcgccagaagagagctgctggataccagctacgatgagaaaaagatcatgtccatcaccgataccggcatccagcgcatcctgctgaaccatctgcacaaatacgacgacgaaaagggcaaagctcaccccgagaacgcttttagccccgagggcatcatggaaatgaacaagaacatccaagagctgaacggcggcaagccccacaagcctatctacagcgtgcgcaagaccgaaagcaagggcatgaagtttagcgtgggcagctccatcaacaacctccggaaatatgtcgaggccgacaagggcaccaacctgtacttcgccatctacatcgataacgacggcctgcggagctacgagagcatccccttcaacatcgtggtggaaagactgaagcggagactgcctgccgccgaagaagtgaaagaggacggcagaaagctgctgttcacactgagccccaacgacctggtgtatgtgaaagaagatgactccaagatcaacgagaacgacaacctggacaatggcagcgtgtacaagatgatcagcagcagcgacagagactgcttcttcatccccgcctttgtggcctctcctatcgtgaaaaccattgagctgggctccaacaacaagtccgagagatcctggaacggcctgcagattaagaaagtgtgctgcaagctgtatgtggaccggctgggaagagtgtataagatcatccagggatcc

SEQ ID NO: 324 - DNA, 4620 bp, synthetic construct
  misc_feature 1..4620: note = Synthetic sequence or unknown origin
  source 1..4620: mol_type = other DNA
ggtaccaagaagatcctgggcctcgacctgggcacaaattctatcggatgggccctcgtggaaaagagcgacaaagagggcagaatcatcaagagcggcagccggatcattcccatggatgccggcgaactgagcgacttcgccaatggcaagaccaagagcaagaccgccgaccggacaagcaagagatctgccagacggctgagagagcggttcctgctgagaagagagagactgcaccggctgctgaggatcatcggactgctgcctaagcactacgaggaacggatcggctgggacatcgagaacgatgagaagcacttcggcatctttctggaaggcgaggaacccaagatcaactacctgaaggacgagaacggcaagaatcggttcctgttcgaggacagcttcctggaaatggtcaaagagttcaagggcaagcaccccgagctgaagtctatccccaaggactggaccctgtaccacctgagaaacaaggccctgcacagcaagatcagcaaagaggaactggcctggatcatcctgaacttcaaccagaagcggggctacaaccagctgagagatgaggtgctggacagccaggatggcaagaagtccgagtacaaagagctgatcgtcaagaaagtgacccctgacgaggactccaagggcgagaagaagtggtacaccatcgagtttaagggcagcgacatcatctaccggcggcagtctaagtacgacctggactgggttggaaagaagagaggcctgatcatcaccaccaagatcgacgagaatggcgagacaaagctgaagaaggacggcagcctggactacagcatcaagtccccagaggacgatgactggggcctgctgaagatcaagaccgagcaggatctgagactgagcggcctgacaatcggccagtacatctatcacgccctgctggacaaccccagccagaagattagaggcggcctcgtcagagtgatcgagcggagcttttacaaggacgagctgcggaagattctggaaaagcagtgcgagtttcaccccgagttcaacgaccgggacctgtacgagaagtgcatcaccgagctgtacaagaacaacacagcccaccggaacaacatcaagaacaaggacttcacctacctgattctcgaggacgtgctgttctaccagcggcctctgaagtccaagaagtctctgatcgacaactgcccctacgagagccacaacggcttcgacaaagaaaccggcgagatcaagcagttccccatcaagtgtatcgccaagtctaaccccttctaccaagagtaccggatctggaagttcctgagcgacctgcggatcattgccaacacctacgagaaggatggccacctgtacagcgacgtggacgtgacccaagagttcatcaaggacagctacgccatgtccgacctgtttctgtggctgaacgatctggccaaggtggaccagaaaaccatgctgaagaaactgggcatcaagaaggccgaagagaacaagtaccggtggaacttcgtcgaggacaagatctaccccatgaacgccaccagacacgccatcctgtctaagctggacaagggcgaaaagctgaccaaagagaatgagtacctgctgtggaacctgctgtactctacccagagcaaggccgagatcgacaagagcctgagcgagaatacccctagcggcaagcccaacaccaacaagctgtataacaagctccgcaaggatggcatcagcagcgagagcctggaaaagattaagaccatcaagctgcccgacgaaggctacggcgcctattctgagaaggccatcaagaaactgctgcccctgatgagaaccggccagtgctgggacgccgacaacatcgatatgtacaccgccagcagaatccaggccttcatcgaggaaaacaacctggacaacttcagcgagcggatctggtcccggatcagcagcctgaaaaccgtggattcttaccagggcctgcctgagtggctggcctgttacattgtgtacggcagacacagcgaggccaacgaggtggtcaagtggaaaacccctcaggatatcgacatgtacctcaacaacttccggcagtacagcctgaggaaccccgtggtggaatccatcgtgctggaaacactgagagtcgtgcgggacctgatggccaaatacggcaacttcgacgagatccacatcgagctgggcagagatctgaagaaccccagcgacaagagagccagcatcacaaagcagatcctggaaaacgagaacaccaacctgaggattaaggccctgatcagcgagttcaccgactctgagttcaagatcgagaatgtgcggccctactctcctagccagcaagagctgctgcggatctacgaagaggacatcctgaatcagtacgagcccgacagcgagattctggggatcatcaaagaactgagcaaccccaccgtgcagcctagccggaacaaggtgctgaagtacaagtgctggctggatcagaaatacgtgtccccttataccggcaagcctattcctctgagccggctgttcacctccgactacgagatcgagcacatcatcccacagagccggtactttgacgacagcttcagcaacaaagtgatctgcgagagcgaagtgaacaagctgaaggacaacctgctggcctacgagtttatcaagcagcaccacggctacaccctgcagtctggcgtgcgcatcttcgaagtgaaagagtacgaagaacacattaagaacgtgtactccagccggaaggccagctccaagcggaaaaaactgctgatggacgacatccccaccgatttcatcgagagacagctgaacgacagccggtacatcagcaaggtcgtgaagtccctgctgtccaaccttgtgcgcgaggaagatgagaacggaaacctggaacctgaggccatctctaagaacctgatcgtgtgcaacggcaccgtgaccaccagactgaagagagattggggcctgggcgaagtgtggaacagcattgtgctgccccggttccagagactgaatgacctgaccggcagaacctgcttcaccaccaccaacaaagaaggcaaagaaatccccgccatgcctctggaactgcagaagggcttcaatatcaagcggatcgaccaccggcaccacgccatggacgctatcgtgattgcctgcaccaccagagaacatgtgaatctgctgaacaacgaggccagcctgcctaagaacaaagagatgaagtacgccctgagccacagactgcggagatacgccgaagaaatcgtgaacggccagaagaggaatatccccaaagaatttctgatgccctggccgagctttaagaccgactgcaagaacagcctgaacgagatcgtggtgtccttcaagcagaacatccgggtcctgaacaaggccaccaacagctacttcgcctacaacgacgacggccacaagatcctgaaccaccagcacggctctgaccacttcgccatcagaaagagcctgcacaaagagacaatcttcggccacgtgaacctgcggtggaagaaagagggaaagctgaaagaggccattagcaagcccagcatgatcgtggaccggcgcctgaagaaaaagatccaagagatgctcaacaagaactacagcgagaagcagattctggcctacttcaagaacttcagctacgagtggaaagagttcgacttcaacaagattgagctgtactacttctccgacgagaaagaagccctggttgccaccagattcggcaacgacctggtgtctctgttcagcggcaagactaagaaagaagaaattgagaaagtcatcgagaagatcaccgacagcggcatccggaaaatcctgagcacatacctgagccagaacctcgagaaaatcgaggaagctttcagccccgacggcctcgaaaagatgaacgagaatatcagcagctacaacaacggcaaagagcacaagcccatctacaaagtgcggctgttccagcctaagggcaacaagttcctcgtgggcgacgtgggctgcaacagcaaaaagtttgtggtggccgacgccggcaccaatctgtactttgccgtgtacgccagcagcaacggcaagcggacatacaagacaatccctctcgaggaagtgattgagcggctgaagaacaaaatcagccccgtgcctgacatcgacgaaaacggaaacaatctcctgttccatctgagccccaacgacatcgtgtacctgcctaccaccgaccagatcatcagcaaccacgacctgatccaggacttcgaccggaacagattctaccggttcatcgacagcagcggcacaaccgccaacttcatccctgccaacagcgccaacgtgatctaccatctggaaaaaaatgaggccaagaaattctgcatcggcgccgtcatccaggatgagtatggcaagggcagccctcagagcaagaatcagaaggcccctaccaaggacgaagagatgatcaaagagctgtgcatccctctgagcatcaaccggctgggcgacattaagcagaagggatcc

SEQ ID NO: 325 - RNA, 105 nt, synthetic construct
  misc_feature 1..105: note = Synthetic sequence or unknown origin
  source 1..105: mol_type = other RNA
gttatcgcttcctttcgaaagaaaggaagcgataataatcgataaatttcgagtggggcaacggcgatccggtcttgtatcggggtagccgtcccctaatttttt

SEQ ID NO: 326 - RNA, 16 nt, synthetic construct
  misc_feature 1..16: note = Synthetic sequence or unknown origin
  source 1..16: mol_type = other RNA
gttatcgcttcctttc

SEQ ID NO: 327 - RNA, 15 nt, synthetic construct
  misc_feature 1..15: note = Synthetic sequence or unknown origin
  source 1..15: mol_type = other RNA
gttatcgcttccttt

SEQ ID NO: 328 - RNA, 12 nt, synthetic construct
  misc_feature 1..12: note = Synthetic sequence or unknown origin
  source 1..12: mol_type = other RNA
gttatcgcttcc

SEQ ID NO: 329 - RNA, 10 nt, synthetic construct
  misc_feature 1..10: note = Synthetic sequence or unknown origin
  source 1..10: mol_type = other RNA
gttatcgctt

SEQ ID NO: 330 - RNA, 16 nt, synthetic construct
  misc_feature 1..16: note = Synthetic sequence or unknown origin
  source 1..16: mol_type = other RNA
gaaaggaagcgataat

SEQ ID NO: 331 - RNA, 15 nt, synthetic construct
  misc_feature 1..15: note = Synthetic sequence or unknown origin
  source 1..15: mol_type = other RNA
aaaggaagcgataat

SEQ ID NO: 332 - RNA, 12 nt, synthetic construct
  misc_feature 1..12: note = Synthetic sequence or unknown origin
  source 1..12: mol_type = other RNA
ggaagcgataat

SEQ ID NO: 333 - RNA, 10 nt, synthetic construct
  misc_feature 1..10: note = Synthetic sequence or unknown origin
  source 1..10: mol_type = other RNA
aagcgataat

SEQ ID NO: 334 - RNA, 18 nt, synthetic construct
  misc_feature 1..18: note = Synthetic sequence or unknown origin
  source 1..18: mol_type = other RNA
aatcgataaatttcgagt

SEQ ID NO: 335 - RNA, 16 nt, synthetic construct
  misc_feature 1..16: note = Synthetic sequence or unknown origin
  source 1..16: mol_type = other RNA
aatcgataaatttcga

SEQ ID NO: 336 - RNA, 51 nt, synthetic construct
  misc_feature 1..51: note = Synthetic sequence or unknown origin
  source 1..51: mol_type = other RNA
ggggcaacggcgatccggtcttgtatcggggtagccgtcccctaatttttt

SEQ ID NO: 337 - RNA, 42 nt, synthetic construct
  misc_feature 1..42: note = Synthetic sequence or unknown origin
  source 1..42: mol_type = other RNA
ggggcaacggcgatccggtcttgtatcggggtagccgtcccc

SEQ ID NO: 338 - RNA, 45 nt, synthetic construct
  misc_feature 1..45: note = Synthetic sequence or unknown origin
  source 1..45: mol_type = other RNA
ggggcaacggcgatccggtcttgtatcggggtagccgtcccctaa

SEQ ID NO: 339 - RNA, 104 nt, synthetic construct
  misc_feature 1..104: note = Synthetic sequence or unknown origin
  source 1..104: mol_type = other RNA
gttgtgacttgcactcgaaagtgtgcttgccataacaagcgcaagtcgcgcaggcactgccccggcgggcatcacccgatgcccgccggggtatctcctttttt

SEQ ID NO: 340 - RNA, 16 nt, synthetic construct
  misc_feature 1..16: note = Synthetic sequence or unknown origin
  source 1..16: mol_type = other RNA
gttgtgacttgcactc

SEQ ID NO: 341 - RNA, 15 nt, synthetic construct
  misc_feature 1..15: note = Synthetic sequence or unknown origin
  source 1..15: mol_type = other RNA
gttgtgacttgcact

SEQ ID NO: 342 - RNA, 12 nt, synthetic construct
  misc_feature 1..12: note = Synthetic sequence or unknown origin
  source 1..12: mol_type = other RNA
gttgtgacttgc

SEQ ID NO: 343 - RNA, 10 nt, synthetic construct
  misc_feature 1..10: note = Synthetic sequence or unknown origin
  source 1..10: mol_type = other RNA
gttgtgactt

SEQ ID NO: 344 - RNA, 16 nt, synthetic construct
  misc_feature 1..16: note = Synthetic sequence or unknown origin
  source 1..16: mol_type = other RNA
gtgtgcttgccataac

SEQ ID NO: 345 - RNA, 16 nt, synthetic construct
  misc_feature 1..16: note = Synthetic sequence or unknown origin
  source 1..16: mol_type = other RNA
gtgtgcttgccataac

SEQ ID NO: 346 - RNA, 12 nt, synthetic construct
  misc_feature 1..12: note = Synthetic sequence or unknown origin
  source 1..12: mol_type = other RNA
gcttgccataac

SEQ ID NO: 347 - RNA, 10 nt, synthetic construct
  misc_feature 1..10: note = Synthetic sequence or unknown origin
  source 1..10: mol_type = other RNA
ttgccataac

SEQ ID NO: 348 - RNA, 15 nt, synthetic construct
  misc_feature 1..15: note = Synthetic sequence or unknown origin
  source 1..15: mol_type = other RNA
aagcgcaagtcgcgc

SEQ ID NO: 349 - RNA, 15 nt, synthetic construct
  misc_feature 1..15: note = Synthetic sequence or unknown origin
  source 1..15: mol_type = other RNA
aagcgcaagtcgcgc

SEQ ID NO: 350 - RNA, 53 nt, synthetic construct
  misc_feature 1..53: note = Synthetic sequence or unknown origin
  source 1..53: mol_type = other RNA
aggcactgccccggcgggcatcacccgatgcccgccggggtatctcctttttt

SEQ ID NO: 351 - RNA, 48 nt, synthetic construct
  misc_feature 1..48: note = Synthetic sequence or unknown origin
  source 1..48: mol_type = other RNA
aggcactgccccggcgggcatcacccgatgcccgccggggtatctcct

SEQ ID NO: 352 - RNA, 47 nt, synthetic construct
  misc_feature 1..47: note = Synthetic sequence or unknown origin
  source 1..47: mol_type = other RNA
aggcactgccccggcgggcatcacccgatgcccgccggggtatctcc

SEQ ID NO: 353 - RNA, 115 nt, synthetic construct
  misc_feature 1..115: note = Synthetic sequence or unknown origin
  source 1..115: mol_type = other RNA
gttatagttgcctttcgaaagaaaggcgactataataatcgagaaatttcgagtaaggctctaacgtttacacgttatccgaaaagcagccggttcgccggttgcttcttttttt

SEQ ID NO: 354 - RNA, 16 nt, synthetic construct
  misc_feature 1..16: note = Synthetic sequence or unknown origin
  source 1..16: mol_type = other RNA
gttatagttgcctttc

SEQ ID NO: 355 - RNA, 15 nt, synthetic construct
  misc_feature 1..15: note = Synthetic sequence or unknown origin
  source 1..15: mol_type = other RNA
gttatagttgccttt

SEQ ID NO: 356 - RNA, 12 nt, synthetic construct
  misc_feature 1..12: note = Synthetic sequence or unknown origin
  source 1..12: mol_type = other RNA
gttatagttgcc

SEQ ID NO: 357 - RNA, 10 nt, synthetic construct
  misc_feature 1..10: note = Synthetic sequence or unknown origin
  source 1..10: mol_type = other RNA
gttatagttg

SEQ ID NO: 358 - RNA, 16 nt, synthetic construct
  misc_feature 1..16: note = Synthetic sequence or unknown origin
  source 1..16: mol_type = other RNA
gaaaggcgactataat

SEQ ID NO: 359 - RNA, 15 nt, synthetic construct
  misc_feature 1..15: note = Synthetic sequence or unknown origin
  source 1..15: mol_type = other RNA
aaaggcgactataat

SEQ ID NO: 360 - RNA, 12 nt, synthetic construct
  misc_feature 1..12: note = Synthetic sequence or unknown origin
  source 1..12: mol_type = other RNA
ggcgactataat

SEQ ID NO: 361 - RNA, 10 nt, synthetic construct
  misc_feature 1..10: note = Synthetic sequence or unknown origin
  source 1..10: mol_type = other RNA
cgactataat

SEQ ID NO: 362 - RNA, 20 nt, synthetic construct
  misc_feature 1..20: note = Synthetic sequence or unknown origin
  source 1..20: mol_type = other RNA
aatcgagaaatttcgagtaa

SEQ ID NO: 363 - RNA, 16 nt, synthetic construct
  misc_feature 1..16: note = Synthetic sequence or unknown origin
  source 1..16: mol_type = other RNA
aatcgagaaatttcga

SEQ ID NO: 364 - RNA, 27 nt, synthetic construct
  misc_feature 1..27: note = Synthetic sequence or unknown origin
  source 1..27: mol_type = other RNA
ggctctaacgtttacacgttatccgaa

SEQ ID NO: 365 - RNA, 24 nt, synthetic construct
  misc_feature 1..24: note = Synthetic sequence or unknown origin
  source 1..24: mol_type = other RNA
ggctctaacgtttacacgttatcc

SEQ ID NO: 366 - RNA, 32 nt, synthetic construct
  misc_feature 1..32: note = Synthetic sequence or unknown origin
  source 1..32: mol_type = other RNA
aagcagccggttcgccggttgcttcttttttt

SEQ ID NO: 367 - RNA, 24 nt, synthetic construct
  misc_feature 1..24: note = Synthetic sequence or unknown origin
  source 1..24: mol_type = other RNA
aagcagccggttcgccggttgctt

SEQ ID NO: 368 - RNA, 25 nt, synthetic construct
  misc_feature 1..25: note = Synthetic sequence or unknown origin
  source 1..25: mol_type = other RNA
aagcagccggttcgccggttgcttc

SEQ ID NO: 369 - RNA, 117 nt, synthetic construct
  misc_feature 1..117: note = Synthetic sequence or unknown origin
  source 1..117: mol_type = other RNA
gttttgatttactcttaatgaaagttaagagtccaatcagaattgacaagagaatagtcggtacctctgctaaagcacgtaaagatctcattctctaaaacatttaaaaaatttttt

SEQ ID NO: 370 - RNA, 19 nt, synthetic construct
  misc_feature 1..19: note = Synthetic sequence or unknown origin
  source 1..19: mol_type = other RNA
gttttgatttactcttaat

SEQ ID NO: 371 - RNA, 15 nt, synthetic construct
  misc_feature 1..15: note = Synthetic sequence or unknown origin
  source 1..15: mol_type = other RNA
gttttgatttactct

SEQ ID NO: 372 - RNA, 12 nt, synthetic construct
  misc_feature 1..12: note = Synthetic sequence or unknown origin
  source 1..12: mol_type = other RNA
gttttgatttac

SEQ ID NO: 373 - RNA, 10 nt, synthetic construct
  misc_feature 1..10: note = Synthetic sequence or unknown origin
  source 1..10: mol_type = other RNA
gttttgattt

SEQ ID NO: 374 - RNA, 20 nt, synthetic construct
  misc_feature 1..20: note = Synthetic sequence or unknown origin
  source 1..20: mol_type = other RNA
gttaagagtccaatcagaat

SEQ ID NO: 375 - RNA, 16 nt, synthetic construct
  misc_feature 1..16: note = Synthetic sequence or unknown origin
  source 1..16: mol_type = other RNA
agagtccaatcagaat

SEQ ID NO: 376 - RNA, 13 nt, synthetic construct
  misc_feature 1..13: note = Synthetic sequence or unknown origin
  source 1..13: mol_type = other RNA
gtccaatcagaat

SEQ ID NO: 377 - RNA, 11 nt, synthetic construct
  misc_feature 1..11: note = Synthetic sequence or unknown origin
  source 1..11: mol_type = other RNA
ccaatcagaat

SEQ ID NO: 378 - RNA, 74 nt, synthetic construct
  misc_feature 1..74: note = Synthetic sequence or unknown origin
  source 1..74: mol_type = other RNA
tgacaagagaatagtcggtacctctgctaaagcacgtaaagatctcattctctaaaacatttaaaaaatttttt

SEQ ID NO: 379 - RNA, 48 nt, synthetic construct
  misc_feature 1..48: note = Synthetic sequence or unknown origin
  source 1..48: mol_type = other RNA
agagaatagtcggtacctctgctaaagcacgtaaagatctcattctct

SEQ ID NO: 380 - RNA, 68 nt, synthetic construct
  misc_feature 1..68: note = Synthetic sequence or unknown origin
  source 1..68: mol_type = other RNA
tgacaagagaatagtcggtacctctgctaaagcacgtaaagatctcattctctaaaacatttaaaaaa

SEQ ID NO: 381 - RNA, 96 nt, synthetic construct
  misc_feature 1..96: note = Synthetic sequence or unknown origin
  source 1..96: mol_type = other RNA
gctatagtttcctttcgaagaaattcgaaacgttactatagtaagaaattttcgaaaagttctgcctaatactattatgtattaggcatctttttt

SEQ ID NO: 382 - RNA, 19 nt, synthetic construct
  misc_feature 1..19: note = Synthetic sequence or unknown origin
  source 1..19: mol_type = other RNA
gctatagtttcctttcgaa

SEQ ID NO: 383 - RNA, 15 nt, synthetic construct
  misc_feature 1..15: note = Synthetic sequence or unknown origin
  source 1..15: mol_type = other RNA
gctatagtttccttt

SEQ ID NO: 384 - RNA, 12 nt, synthetic construct
  misc_feature 1..12: note = Synthetic sequence or unknown origin
  source 1..12: mol_type = other RNA
gctatagtttcc

SEQ ID NO: 385 - RNA, 10 nt, synthetic construct
  misc_feature 1..10: note = Synthetic sequence or unknown origin
  source 1..10: mol_type = other RNA
gctatagttt

SEQ ID NO: 386 - RNA, 19 nt, synthetic construct
  misc_feature 1..19: note = Synthetic sequence or unknown origin
  source 1..19: mol_type = other RNA
ttcgaaacgttactatagt

SEQ ID NO: 387 - RNA, 15 nt, synthetic construct
  misc_feature 1..15: note = Synthetic sequence or unknown origin
  source 1..15: mol_type = other RNA
aaacgttactatagt

SEQ ID NO: 388 - RNA, 12 nt, synthetic construct
  misc_feature 1..12: note = Synthetic sequence or unknown origin
  source 1..12: mol_type = other RNA
cgttactatagt

SEQ ID NO: 389 - RNA, 10 nt, synthetic construct
  misc_feature 1..10: note = Synthetic sequence or unknown origin
  source 1..10: mol_type = other RNA
ttactatagt

SEQ ID NO: 390 - RNA, 54 nt, synthetic construct
  misc_feature 1..54: note = Synthetic sequence or unknown origin
  source 1..54: mol_type = other RNA
aagaaattttcgaaaagttctgcctaatactattatgtattaggcatctttttt

SEQ ID NO: 391 - RNA, 42 nt, synthetic construct
  misc_feature 1..42: note = Synthetic sequence or unknown origin
  source 1..42: mol_type = other RNA
gaaaagttctgcctaatactattatgtattaggcatcttttt

SEQ ID NO: 392 - RNA, 48 nt, synthetic construct
  misc_feature 1..48: note = Synthetic sequence or unknown origin
  source 1..48: mol_type = other RNA
aagaaattttcgaaaagttctgcctaatactattatgtattaggcatc

SEQ ID NO: 393 - RNA, 96 nt, synthetic construct
  misc_feature 1..96: note = Synthetic sequence or unknown origin
  source 1..96: mol_type = other RNA
gctatagtttcctttcgaagaaattcgaaacgttactatagtaagaaattctcgaaaagttctgcctaatactattatgtattaggcatctttttt

SEQ ID NO: 394 - RNA, 54 nt, synthetic construct
  misc_feature 1..54: note = Synthetic sequence or unknown origin
  source 1..54: mol_type = other RNA
aagaaattctcgaaaagttctgcctaatactattatgtattaggcatctttttt

SEQ ID NO: 395 - RNA, 48 nt, synthetic construct
  misc_feature 1..48: note = Synthetic sequence or unknown origin
  source 1..48: mol_type = other RNA
aagaaattctcgaaaagttctgcctaatactattatgtattaggcatc

SEQ ID NO: 396 - RNA, 100 nt, synthetic construct
  misc_feature 1..100: note = Synthetic sequence or unknown origin
  source 1..100: mol_type = other RNA
gctggggcttgtagaggaaactctacaagtcctggtaaaggatttgctggctactttctgcggaaagtccattcgggcggcttcataagccgtctttttt

SEQ ID NO: 397 - RNA, 16 nt, synthetic construct
  misc_feature 1..16: note = Synthetic sequence or unknown origin
  source 1..16: mol_type = other RNA
gctggggcttgtagag

SEQ ID NO: 398 - RNA, 15 nt, synthetic construct
  misc_feature 1..15: note = Synthetic sequence or unknown origin
  source 1..15: mol_type = other RNA
gctggggcttgtaga

SEQ ID NO: 399 - RNA, 12 nt, synthetic construct
  misc_feature 1..12: note = Synthetic sequence or unknown origin
  source 1..12: mol_type = other RNA
gctggggcttgt

SEQ ID NO: 400 - RNA, 10 nt, synthetic construct
  misc_feature 1..10: note = Synthetic sequence or unknown origin
  source 1..10: mol_type = other RNA
gctggggctt

SEQ ID NO: 401 - RNA, 16 nt, synthetic construct
  misc_feature 1..16: note = Synthetic sequence or unknown origin
  source 1..16: mol_type = other RNA
ctctacaagtcctggt

SEQ ID NO: 402 - RNA, 15 nt, synthetic construct
  misc_feature 1..15: note = Synthetic sequence or unknown origin
  source 1..15: mol_type = other RNA
tctacaagtcctggt

SEQ ID NO: 403 - RNA, 12 nt, synthetic construct
  misc_feature 1..12: note = Synthetic sequence or unknown origin
  source 1..12: mol_type = other RNA
acaagtcctggt

SEQ ID NO: 404 - RNA, 10 nt, synthetic construct
  misc_feature 1..10: note = Synthetic sequence or unknown origin
  source 1..10: mol_type = other RNA
aagtcctggt

SEQ ID NO: 405 - RNA, 38 nt, synthetic construct
  misc_feature 1..38: note = Synthetic sequence or unknown origin
  source 1..38: mol_type = other RNA
aaaggatttgctggctactttctgcggaaagtccattc

SEQ ID NO: 406 - RNA, 34 nt, synthetic construct
  misc_feature 1..34: note = Synthetic sequence or unknown origin
  source 1..34: mol_type = other RNA
aaaggatttgctggctactttctgcggaaagtcc

SEQ ID NO: 407 - RNA, 26 nt, synthetic construct
  misc_feature 1..26: note = Synthetic sequence or unknown origin
  source 1..26: mol_type = other RNA
gggcggcttcataagccgtctttttt

SEQ ID NO: 408 - RNA, 21 nt, synthetic construct
  misc_feature 1..21: note = Synthetic sequence or unknown origin
  source 1..21: mol_type = other RNA
gggcggcttcataagccgtct

SEQ ID NO: 409 - RNA, 20 nt, synthetic construct
  misc_feature 1..20: note = Synthetic sequence or unknown origin
  source 1..20: mol_type = other RNA
gggcggcttcataagccgtc

SEQ ID NO: 410 - RNA, 105 nt, synthetic construct
  misc_feature 1..105: note = Synthetic sequence or unknown origin
  source 1..105: mol_type = other RNA
gttatagtttcctttcgaagaaatttgaaacgttactataataagaaagtttcgtgaagttctgtccgataattttatcggacatcttctttttgcggctttttt

SEQ ID NO: 411 - RNA, 19 nt, synthetic construct
  misc_feature 1..19: note = Synthetic sequence or unknown origin
  source 1..19: mol_type = other RNA
gttatagtttcctttcgaa

SEQ ID NO: 412 - RNA, 15 nt, synthetic construct
  misc_feature 1..15: note = Synthetic sequence or unknown origin
  source 1..15: mol_type = other RNA
gttatagtttccttt

SEQ ID NO: 413 - RNA, 12 nt, synthetic construct
  misc_feature 1..12: note = Synthetic sequence or unknown origin
  source 1..12: mol_type = other RNA
gttatagtttcc

SEQ ID NO: 414 - RNA, 10 nt, synthetic construct
  misc_feature 1..10: note = Synthetic sequence or unknown origin
  source 1..10: mol_type = other RNA
gttatagttt

SEQ ID NO: 415 - RNA, 19 nt, synthetic construct
  misc_feature 1..19: note = Synthetic sequence or unknown origin
  source 1..19: mol_type = other RNA
tttgaaacgttactataat

SEQ ID NO: 416 - RNA, 15 nt, synthetic construct
  misc_feature 1..15: note = Synthetic sequence or unknown origin
  source 1..15: mol_type = other RNA
aaacgttactataat

SEQ ID NO: 417 - RNA, 12 nt, synthetic construct
  misc_feature 1..12: note = Synthetic sequence or unknown origin
  source 1..12: mol_type = other RNA
cgttactataat

SEQ ID NO: 418 - RNA, 10 nt, synthetic construct
  misc_feature 1..10: note = Synthetic sequence or unknown origin
  source 1..10: mol_type = other RNA
ttactataat

SEQ ID NO: 419 - RNA, 63 nt, synthetic construct
  misc_feature 1..63: note = Synthetic sequence or unknown origin
  source 1..63: mol_type = other RNA
aagaaagtttcgtgaagttctgtccgataattttatcggacatcttctttttgcggctttttt

SEQ ID NO: 420 - RNA, 63 nt, synthetic construct; identical to SEQ ID NO: 419
  misc_feature 1..63: note = Synthetic sequence or unknown origin
  source 1..63: mol_type = other RNA

SEQ ID NO: 421 - RNA, 57 nt, synthetic construct
  misc_feature 1..57: note = Synthetic sequence or unknown origin
  source 1..57: mol_type = other RNA
aagaaagtttcgtgaagttctgtccgataattttatcggacatcttctttttgcggc

SEQ ID NO: 422 - RNA, 105 nt, synthetic construct
  misc_feature 1..105: note = Synthetic sequence or unknown origin
  source 1..105: mol_type = other RNA
gttatagtttcctttcgaagaaatttgaaacgttactataataagaaagtttcgtgaagttctgtccgataatcttatcggacatcttctttctgcggctttttt

SEQ ID NO: 423 - RNA, 63 nt, synthetic construct
  misc_feature 1..63: note = Synthetic sequence or unknown origin
  source 1..63: mol_type = other RNA
aagaaagtttcgtgaagttctgtccgataatcttatcggacatcttctttctgcggctttttt

SEQ ID NO: 424 - RNA, 63 nt, synthetic construct; identical to SEQ ID NO: 423
  misc_feature 1..63: note = Synthetic sequence or unknown origin
  source 1..63: mol_type = other RNA

SEQ ID NO: 425 - RNA, 57 nt, synthetic construct
  misc_feature 1..57: note = Synthetic sequence or unknown origin
  source 1..57: mol_type = other RNA
aagaaagtttcgtgaagttctgtccgataatcttatcggacatcttctttctgcggc

SEQ ID NO: 426 - RNA, 95 nt, synthetic construct
  misc_feature 1..95: note = Synthetic sequence or unknown origin
  source 1..95: mol_type = other RNA
gttatagtttcctttcgaagaaatttgaaacgttactataataagaaagtttcgtgaagttctgtccgataattttatcggacatcttctttttt

SEQ ID NO: 427 - RNA, 53 nt, synthetic construct
  misc_feature 1..53: note = Synthetic sequence or unknown origin
  source 1..53: mol_type = other RNA
aagaaagtttcgtgaagttctgtccgataattttatcggacatcttctttttt

SEQ ID NO: 428 - RNA, 34 nt, synthetic construct
  misc_feature 1..34: note = Synthetic sequence or unknown origin
  source 1..34: mol_type = other RNA
gaagttctgtccgataattttatcggacatcttc

SEQ ID NO: 429 - RNA, 47 nt, synthetic construct
  misc_feature 1..47: note = Synthetic sequence or unknown origin
  source 1..47: mol_type = other RNA
aagaaagtttcgtgaagttctgtccgataattttatcggacatcttc

SEQ ID NO: 430 - RNA, 95 nt, synthetic construct
  misc_feature 1..95: note = Synthetic sequence or unknown origin
  source 1..95: mol_type = other RNA
gttatagtttcctttcgaagaaatttgaaacgttactataataagaaagtttcgtgaagttctgtccgataatcttatcggacatcttctttttt

SEQ ID NO: 431 - RNA, 53 nt, synthetic construct
  misc_feature 1..53: note = Synthetic sequence or unknown origin
  source 1..53: mol_type = other RNA
aagaaagtttcgtgaagttctgtccgataatcttatcggacatcttctttttt

SEQ ID NO: 432 - RNA, 34 nt, synthetic construct
  misc_feature 1..34: note = Synthetic sequence or unknown origin
  source 1..34: mol_type = other RNA
gaagttctgtccgataatcttatcggacatcttc

SEQ ID NO: 433 - RNA, 47 nt, synthetic construct
  misc_feature 1..47: note = Synthetic sequence or unknown origin
  source 1..47: mol_type = other RNA
aagaaagtttcgtgaagttctgtccgataatcttatcggacatcttc

SEQ ID NO: 434 - RNA, 97 nt, synthetic construct
  misc_feature 1..97: note = Synthetic sequence or unknown origin
  source 1..97: mol_type = other RNA
gttttgatttgagtgaaaactcaaatcttaactgatgaatgcggatatacagcaccgaaactttattgtttcgcctgtatatccgttttcgtttttt

SEQ ID NO: 435 - RNA, 14 nt, synthetic construct
  misc_feature 1..14: note = Synthetic sequence or unknown origin
  source 1..14: mol_type = other RNA
gttttgatttgagt

SEQ ID NO: 436 - RNA, 12 nt, synthetic construct
  misc_feature 1..12: note = Synthetic sequence or unknown origin
  source 1..12: mol_type = other RNA
gttttgatttga

SEQ ID NO: 437 - RNA, 10 nt, synthetic construct
  misc_feature 1..10: note = Synthetic sequence or unknown origin
  source 1..10: mol_type = other RNA
gttttgattt

SEQ ID NO: 438 - RNA, 14 nt, synthetic construct
  misc_feature 1..14: note = Synthetic sequence or unknown origin
  source 1..14: mol_type = other RNA
actcaaatcttaac

SEQ ID NO: 439 - RNA, 12 nt, synthetic construct
  misc_feature 1..12: note = Synthetic sequence or unknown origin
  source 1..12: mol_type = other RNA
tcaaatcttaac

SEQ ID NO: 440 - RNA, 10 nt, synthetic construct
  misc_feature 1..10: note = Synthetic sequence or unknown origin
  source 1..10: mol_type = other RNA
aaatcttaac

SEQ ID NO: 441 - RNA, 65 nt, synthetic construct
  misc_feature 1..65: note = Synthetic sequence or unknown origin
  source 1..65: mol_type = other RNA
tgatgaatgcggatatacagcaccgaaactttattgtttcgcctgtatatccgttttcgtttttt

SEQ ID NO: 442 - RNA, 60 nt, synthetic construct
  misc_feature 1..60: note = Synthetic sequence or unknown origin
  source 1..60: mol_type = other RNA
gatgaatgcggatatacagcaccgaaactttattgtttcgcctgtatatccgttttcgtt

SEQ ID NO: 443 - RNA, 59 nt, synthetic construct
  misc_feature 1..59: note = Synthetic sequence or unknown origin
  source 1..59: mol_type = other RNA
tgatgaatgcggatatacagcaccgaaactttattgtttcgcctgtatatccgttttcg

SEQ ID NO: 444 - RNA, 91 nt, synthetic construct
  misc_feature 1..91: note = Synthetic sequence or unknown origin
  source 1..91: mol_type = other RNA
gttttgatttgagtgaaaactcaaatcttaactgatgaatgcggatatacagcaccgaaactttattgtttcgcctgtatatccgtttttt

SEQ ID NO: 445 - RNA, 59 nt, synthetic construct
  misc_feature 1..59: note = Synthetic sequence or unknown origin
  source 1..59: mol_type = other RNA
tgatgaatgcggatatacagcaccgaaactttattgtttcgcctgtatatccgtttttt

SEQ ID NO: 446 - RNA, 54 nt, synthetic construct
  misc_feature 1..54: note = Synthetic sequence or unknown origin
  source 1..54: mol_type = other RNA
gaatgcggatatacagcaccgaaactttattgtttcgcctgtatatccgttttt

SEQ ID NO: 447 - RNA, 53 nt, synthetic construct
  misc_feature 1..53: note = Synthetic sequence or unknown origin
  source 1..53: mol_type = other RNA
tgatgaatgcggatatacagcaccgaaactttattgtttcgcctgtatatccg

SEQ ID NO: 448 - RNA, 112 nt, synthetic construct
  misc_feature 1..112: note = Synthetic sequence or unknown origin
  source 1..112: mol_type = other RNA
gtcatgggttcccttcgaaagaagggaacccatgataacgctgaaggcagaacctgtcttcagcgccgcacagctctgctccggcctcaatggccggagcatctgttttttt

SEQ ID NO: 449 - RNA, 16 nt, synthetic construct
  misc_feature 1..16: note = Synthetic sequence or unknown origin
  source 1..16: mol_type = other RNA
gtcatgggttcccttc

SEQ ID NO: 450 - RNA, 15 nt, synthetic construct
  misc_feature 1..15: note = Synthetic sequence or unknown origin
  source 1..15: mol_type = other RNA
gtcatgggttccctt

SEQ ID NO: 451 - RNA, 12 nt, synthetic construct
  misc_feature 1..12: note = Synthetic sequence or unknown origin
  source 1..12: mol_type = other RNA
gtcatgggttcc

SEQ ID NO: 452 - RNA, 10 nt, synthetic construct
  misc_feature 1..10: note = Synthetic sequence or unknown origin
  source 1..10: mol_type = other RNA
gtcatgggtt

SEQ ID NO: 453 - RNA, 16 nt, synthetic construct
  misc_feature 1..16: note = Synthetic sequence or unknown origin
  source 1..16: mol_type = other RNA
gaagggaacccatgat

SEQ ID NO: 454 - RNA, 15 nt, synthetic construct
  misc_feature 1..15: note = Synthetic sequence or unknown origin
  source 1..15: mol_type = other RNA
aagggaacccatgat

SEQ ID NO: 455 - RNA, 12 nt, synthetic construct
  misc_feature 1..12: note = Synthetic sequence or unknown origin
  source 1..12: mol_type = other RNA
ggaacccatgat

SEQ ID NO: 456 - RNA, 10 nt, synthetic construct
  misc_feature 1..10: note = Synthetic sequence or unknown origin
  source 1..10: mol_type = other RNA
aacccatgat

SEQ ID NO: 457 - RNA, 33 nt, synthetic construct
  misc_feature 1..33: note = Synthetic sequence or unknown origin
  source 1..33: mol_type = other RNA
aacgctgaaggcagaacctgtcttcagcgccgc

SEQ ID NO: 458 - RNA, 29 nt, synthetic construct
  misc_feature 1..29: note = Synthetic sequence or unknown origin
  source 1..29: mol_type = other RNA
aacgctgaaggcagaacctgtcttcagcg

SEQ ID NO: 459 - RNA, 43 nt, synthetic construct
  misc_feature 1..43: note = Synthetic sequence or unknown origin
  source 1..43: mol_type = other RNA
acagctctgctccggcctcaatggccggagcatctgttttttt

SEQ ID NO: 460 - RNA, 37 nt, synthetic construct
  misc_feature 1..37: note = Synthetic sequence or unknown origin
  source 1..37: mol_type = other RNA
acagctctgctccggcctcaatggccggagcatctgt

SEQ ID NO: 461 - RNA, 36 nt, synthetic construct
  misc_feature 1..36: note = Synthetic sequence or unknown origin
  source 1..36: mol_type = other RNA
acagctctgctccggcctcaatggccggagcatctg

SEQ ID NO: 462 - RNA, 89 nt, synthetic construct
  misc_feature 1..89: note = Synthetic sequence or unknown origin
  source 1..89: mol_type = other RNA
gtttgagaaccttgtaagaaattacaaggtgagtgcaaataaggatttatccgaaatagtctgcccgcatcgtgcggcaatcatttttt

SEQ ID NO: 463 - RNA, 17 nt, synthetic construct
  misc_feature 1..17: note = Synthetic sequence or unknown origin
  source 1..17: mol_type = other RNA
gtttgagaaccttgtaa

SEQ ID NO: 464 - RNA, 15 nt, synthetic construct
  misc_feature 1..15: note = Synthetic sequence or unknown origin
  source 1..15: mol_type = other RNA
gtttgagaaccttgt

SEQ ID NO: 465 - RNA, 12 nt, synthetic construct
  misc_feature 1..12: note = Synthetic sequence or unknown origin
  source 1..12: mol_type = other RNA
gtttgagaacct

SEQ ID NO: 466 - RNA, 10 nt, synthetic construct
  misc_feature 1..10: note = Synthetic sequence or unknown origin
  source 1..10: mol_type = other RNA
gtttgagaac

SEQ ID NO: 467 - RNA, 19 nt, synthetic construct
  misc_feature 1..19: note = Synthetic sequence or unknown origin
  source 1..19: mol_type = other RNA
ttacaaggtgagtgcaaat

SEQ ID NO: 468 - RNA, 17 nt, synthetic construct
  misc_feature 1..17: note = Synthetic sequence or unknown origin
  source 1..17: mol_type = other RNA
acaaggtgagtgcaaat

SEQ ID NO: 469 - RNA, 14 nt, synthetic construct
  misc_feature 1..14: note = Synthetic sequence or unknown origin
  source 1..14: mol_type = other RNA
aggtgagtgcaaat

SEQ ID NO: 470 - RNA, 12 nt, synthetic construct
  misc_feature 1..12: note = Synthetic sequence or unknown origin
  source 1..12: mol_type = other RNA
gtgagtgcaaat

SEQ ID NO: 471 - RNA, 12 nt, synthetic construct
  misc_feature 1..12: note = Synthetic sequence or unknown origin
  source 1..12: mol_type = other RNA
aaggatttatcc

SEQ ID NO: 472 - RNA, 12 nt, synthetic construct
  misc_feature 1..12: note = Synthetic sequence or unknown origin
  source 1..12: mol_type = other RNA
aaggatttatcc

SEQ ID NO: 473 - RNA, 37 nt, synthetic construct
  misc_feature 1..37: note = Synthetic sequence or unknown origin
  source 1..37: mol_type = other RNA
gaaatagtctgcccgcatcgtgcggcaatcatttttt

SEQ ID NO: 474 - RNA, 35 nt, synthetic construct
  misc_feature 1..35: note = Synthetic sequence or unknown origin
  source 1..35: mol_type = other RNA
gaaatagtctgcccgcatcgtgcggcaatcatttt

SEQ ID NO: 475 - RNA, 31 nt, synthetic construct
  misc_feature 1..31: note = Synthetic sequence or unknown origin
  source 1..31: mol_type = other RNA
gaaatagtctgcccgcatcgtgcggcaatca

SEQ ID NO: 476 - RNA, 88 nt, synthetic construct
  misc_feature 1..88: note = Synthetic sequence or unknown origin
  source 1..88: mol_type = other RNA
gttgtgaattgctttcgaaagaaagcaattcacaataaggattattccgttgtgaaaacatccagggcggggcaactcgccctttttt

SEQ ID NO: 477 - RNA, 16 nt, synthetic construct
  misc_feature 1..16: note = Synthetic sequence or unknown origin
  source 1..16: mol_type = other RNA
gttgtgaattgctttc

SEQ ID NO: 478 - RNA, 15 nt, synthetic construct
  misc_feature 1..15: note = Synthetic sequence or unknown origin
  source 1..15: mol_type = other RNA
gttgtgaattgcttt

SEQ ID NO: 479 - RNA, 12 nt, synthetic construct
  misc_feature 1..12: note = Synthetic sequence or unknown origin
  source 1..12: mol_type = other RNA
gttgtgaattgc

SEQ ID NO: 480 - RNA, 10 nt, synthetic construct
  misc_feature 1..10: note = Synthetic sequence or unknown origin
  source 1..10: mol_type = other RNA
gttgtgaatt

SEQ ID NO: 481 - RNA, 16 nt, synthetic construct
  misc_feature 1..16: note = Synthetic sequence or unknown origin
  source 1..16: mol_type = other RNA
gaaagcaattcacaat

SEQ ID NO: 482 - RNA, 15 nt, synthetic construct
  misc_feature 1..15: note = Synthetic sequence or unknown origin
  source 1..15: mol_type = other RNA
aaagcaattcacaat

SEQ ID NO: 483 - RNA, 12 nt, synthetic construct
  misc_feature 1..12: note = Synthetic sequence or unknown origin
  source 1..12: mol_type = other RNA
gcaattcacaat

SEQ ID NO: 484 - RNA, 10 nt, synthetic construct
  misc_feature 1..10: note = Synthetic sequence or unknown origin
  source 1..10: mol_type = other RNA
aattcacaat

SEQ ID NO: 485 - RNA, 14 nt, synthetic construct
  misc_feature 1..14: note = Synthetic sequence or unknown origin
  source 1..14: mol_type = other RNA
aaggattattccgt

SEQ ID NO: 486 - RNA, 12 nt, synthetic construct
  misc_feature 1..12: note = Synthetic sequence or unknown origin
  source 1..12: mol_type = other RNA
aaggattattcc

SEQ ID NO: 487 - RNA, 13 nt, synthetic construct
  misc_feature 1..13: note = Synthetic sequence or unknown origin
  source 1..13: mol_type = other RNA
tgtgaaaacatcc

SEQ ID NO: 488 - RNA, 10 nt, synthetic construct
  misc_feature 1..10: note = Synthetic sequence or unknown origin
  source 1..10: mol_type = other RNA
tgtgaaaaca

SEQ ID NO: 489 - RNA, 25 nt, synthetic construct
  misc_feature 1..25: note = Synthetic sequence or unknown origin
  source 1..25: mol_type = other RNA
agggcggggcaactcgccctttttt

SEQ ID NO: 490 - RNA, 20 nt, synthetic construct
  misc_feature 1..20: note = Synthetic sequence or unknown origin
  source 1..20: mol_type = other RNA
agggcggggcaactcgccct

SEQ ID NO: 491 - RNA, 19 nt, synthetic construct
  misc_feature 1..19: note = Synthetic sequence or unknown origin
  source 1..19: mol_type = other RNA
agggcggggcaactcgccc

SEQ ID NO: 492 - RNA, 126 nt, synthetic construct
  misc_feature 1..126: note = Synthetic sequence or unknown origin
  source 1..126: mol_type = other RNA
gttttagtactctgttggaaacaacaagagttctaagataagaccttatgtgtcgtagggtatagcggtatcccgaataattccgctctttgaaatcaacgccgttgcatttgcgacggctttttt

SEQ ID NO: 493 - RNA, 17 nt, synthetic construct
  misc_feature 1..17: note = Synthetic sequence or unknown origin
  source 1..17: mol_type = other RNA
gttttagtactctgttg

SEQ ID NO: 494 - RNA, 15 nt, synthetic construct
  misc_feature 1..15: note = Synthetic sequence or unknown origin
  source 1..15: mol_type = other RNA
gttttagtactctgt

SEQ ID NO: 495 - RNA, 12 nt, synthetic construct
  misc_feature 1..12: note = Synthetic sequence or unknown origin
  source 1..12: mol_type = other RNA
gttttagtactc

SEQ ID NO: 496 - RNA, 10 nt, synthetic construct
  misc_feature 1..10: note = Synthetic sequence or unknown origin
  source 1..10: mol_type = other RNA
gttttagtac

SEQ ID NO: 497 - RNA, 18 nt, synthetic construct
  misc_feature 1..18: note = Synthetic sequence or unknown origin
  source 1..18: mol_type = other RNA
caacaagagttctaagat

SEQ ID NO: 498 - RNA, 16 nt, synthetic construct
  misc_feature 1..16: note = Synthetic sequence or unknown origin
  source 1..16: mol_type = other RNA
acaagagttctaagat

SEQ ID NO: 499 - RNA, 13 nt, synthetic construct
  misc_feature 1..13: note = Synthetic sequence or unknown origin
  source 1..13: mol_type = other RNA
agagttctaagat

SEQ ID NO: 500 - RNA, 10 nt, synthetic construct
  misc_feature 1..10: note = Synthetic sequence or unknown origin
  source 1..10: mol_type = other RNA
gttctaagat

SEQ ID NO: 501 - RNA, 24 nt, synthetic construct
  misc_feature 1..24: note = Synthetic sequence or unknown origin
  source 1..24: mol_type = other RNA
aagaccttatgtgtcgtagggtat

SEQ ID NO: 502 - RNA, 22 nt, synthetic construct
  misc_feature 1..22: note = Synthetic sequence or unknown origin
  source 1..22: mol_type = other RNA
aagaccttatgtgtcgtagggt

SEQ ID NO: 503 - RNA, 37 nt, synthetic construct
  misc_feature 1..37: note = Synthetic sequence or unknown origin
  source 1..37: mol_type = other RNA
agcggtatcccgaataattccgctctttgaaatcaac

SEQ ID NO: 504 - RNA, 24 nt, synthetic construct
  misc_feature 1..24: note = Synthetic sequence or unknown origin
  source 1..24: mol_type = other RNA
agcggtatcccgaataattccgct

SEQ ID NO: 505 - RNA, 26 nt, synthetic construct
  misc_feature 1..26: note = Synthetic sequence or unknown origin
  source 1..26: mol_type = other RNA
gccgttgcatttgcgacggctttttt

SEQ ID NO: 506 - RNA, 20 nt, synthetic construct
  misc_feature 1..20: note = Synthetic sequence or unknown origin
  source 1..20: mol_type = other RNA
gccgttgcatttgcgacggc

SEQ ID NO: 507 - RNA, 20 nt, synthetic construct
  misc_feature 1..20: note = Synthetic sequence or unknown origin
  source 1..20: mol_type = other RNA
gccgttgcatttgcgacggc

SEQ ID NO: 508 - RNA, 126 nt, synthetic construct
  misc_feature 1..126: note = Synthetic sequence or unknown origin
  source 1..126: mol_type = other RNA
gtcttagtactctgttggaaacaacaagagttctaagataagaccttatgtgtcgtagggtatagcggtatcccgaataattccgctctttgaaatcaacgccgttgcatttgcgacggctttttt

SEQ ID NO: 509 - RNA, 17 nt, synthetic construct
  misc_feature 1..17: note = Synthetic sequence or unknown origin
  source 1..17: mol_type = other RNA
gtcttagtactctgttg

SEQ ID NO: 510 - RNA, 15 nt, synthetic construct
  misc_feature 1..15: note = Synthetic sequence or unknown origin
  source 1..15: mol_type = other RNA
gtcttagtactctgt

SEQ ID NO: 511 - RNA, 12 nt, synthetic construct
  misc_feature 1..12: note = Synthetic sequence or unknown origin
  source 1..12: mol_type = other RNA
gtcttagtactc

SEQ ID NO: 512 - RNA, 10 nt, synthetic construct
  misc_feature 1..10: note = Synthetic sequence or unknown origin
  source 1..10: mol_type = other RNA
gtcttagtac

SEQ ID NO: 513 - RNA, 92 nt, synthetic construct
  misc_feature 1..92: note = Synthetic sequence or unknown origin
  source 1..92: mol_type = other RNA
gttttagtactctgtaattgaaaaattacagaatctactaaaacaagacaatatgtcgtgtttagcccatcaatttattggtgggctttttt

SEQ ID NO: 514 - RNA, 19 nt, synthetic construct
  misc_feature 1..19: note = Synthetic sequence or unknown origin
  source 1..19: mol_type = other RNA
gttttagtactctgtaatt

SEQ ID NO: 515 - RNA, 15 nt, synthetic construct
  misc_feature 1..15: note = Synthetic sequence or unknown origin
  source 1..15: mol_type = other RNA
gttttagtactctgt

SEQ ID NO: 516 - RNA, 12 nt, synthetic construct
  misc_feature 1..12: note = Synthetic sequence or unknown origin
  source 1..12: mol_type = other RNA
gttttagtactc

SEQ ID NO: 517 - RNA, 10 nt, synthetic construct
  misc_feature 1..10: note = Synthetic sequence or unknown origin
  source 1..10: mol_type = other RNA
gttttagtac

SEQ ID NO: 518 - RNA, 21 nt, synthetic construct
  misc_feature 1..21: note = Synthetic sequence or unknown origin
  source 1..21: mol_type = other RNA
aattacagaatctactaaaac

SEQ ID NO: 519 - RNA, 17 nt, synthetic construct
  misc_feature 1..17: note = Synthetic sequence or unknown origin
  source 1..17: mol_type = other RNA
acagaatctactaaaac

SEQ ID NO: 520 - RNA, 14 nt, synthetic construct
  misc_feature 1..14: note = Synthetic sequence or unknown origin
  source 1..14: mol_type = other RNA
gaatctactaaaac

SEQ ID NO: 521 - RNA, 12 nt, synthetic construct
  misc_feature 1..12: note = Synthetic sequence or unknown origin
  source 1..12: mol_type = other RNA
atctactaaaac

SEQ ID NO: 522 - RNA, 19 nt, synthetic construct
  misc_feature 1..19: note = Synthetic sequence or unknown origin
  source 1..19: mol_type = other RNA
aagacaatatgtcgtgttt

SEQ ID NO: 523 - RNA, 13 nt, synthetic construct
  misc_feature 1..13: note = Synthetic sequence or unknown origin
  source 1..13: mol_type = other RNA
aagacaatatgtc

SEQ ID NO: 524 - RNA, 29 nt, synthetic construct
  misc_feature 1..29: note = Synthetic sequence or unknown origin
  source 1..29: mol_type = other RNA
agcccatcaatttattggtgggctttttt

SEQ ID NO: 525 - RNA, 24 nt, synthetic construct
  misc_feature 1..24: note = Synthetic sequence or unknown origin
  source 1..24: mol_type = other RNA
agcccatcaatttattggtgggct

SEQ ID NO: 526 - RNA, 23 nt, synthetic construct
  misc_feature 1..23: note = Synthetic sequence or unknown origin
  source 1..23: mol_type = other RNA
agcccatcaatttattggtgggc

SEQ ID NO: 527 - RNA, 92 nt, synthetic construct
  misc_feature 1..92: note = Synthetic sequence or unknown origin
  source 1..92: mol_type = other RNA
gttctagtactctgtaattgaaaaattacagaatctactagaacaagacaatatgtcgtgtttagcccatcaatttattggtgggctttttt

SEQ ID NO: 528 - RNA, 19 nt, synthetic construct
  misc_feature 1..19: note = Synthetic sequence or unknown origin
  source 1..19: mol_type = other RNA
gttctagtactctgtaatt

SEQ ID NO: 529 - RNA, 15 nt, synthetic construct
  misc_feature 1..15: note = Synthetic sequence or unknown origin
  source 1..15: mol_type = other RNA
gttctagtactctgt

SEQ ID NO: 530 - RNA, 12 nt, synthetic construct
  misc_feature 1..12: note = Synthetic sequence or unknown origin
  source 1..12: mol_type = other RNA
gttctagtactc

SEQ ID NO: 531 - RNA, 10 nt, synthetic construct
  misc_feature 1..10: note = Synthetic sequence or unknown origin
  source 1..10: mol_type = other RNA
gttctagtac

SEQ ID NO: 532 - RNA, 21 nt, synthetic construct
  misc_feature 1..21: note = Synthetic sequence or unknown origin
  source 1..21: mol_type = other RNA
aattacagaatctactagaac

SEQ ID NO: 533 - RNA, 17 nt, synthetic construct
  misc_feature 1..17: note = Synthetic sequence or unknown origin
  source 1..17: mol_type = other RNA
acagaatctactagaac

SEQ ID NO: 534 - RNA, 14 nt, synthetic construct
  misc_feature 1..14: note = Synthetic sequence or unknown origin
  source 1..14: mol_type = other RNA
gaatctactagaac

SEQ ID NO: 535 - RNA, 12 nt, synthetic construct
  misc_feature 1..12: note = Synthetic sequence or unknown origin
  source 1..12: mol_type = other RNA
atctactagaac

SEQ ID NO: 536 - RNA, 131 nt, synthetic construct
  misc_feature 1..131: note = Synthetic sequence or unknown origin
  source 1..131: mol_type = other RNA
gctttgccatagttcagaaagaactatgacaaagttagataacgcagaccgcgtccctaaccgccatgcggttacaccgtgttaaaaagcgttgtttaagaggtgcgacttcacggttgcgcctctttttt

SEQ ID NO: 537 - RNA, 16 nt, synthetic construct
  misc_feature 1..16: note = Synthetic sequence or unknown origin
  source 1..16: mol_type = other RNA
gctttgccatagttca

SEQ ID NO: 538 - RNA, 15 nt, synthetic construct
  misc_feature 1..15: note = Synthetic sequence or unknown origin
  source 1..15: mol_type = other RNA
gctttgccatagttc

SEQ ID NO: 539 - RNA, 12 nt, synthetic construct
  misc_feature 1..12: note = Synthetic sequence or unknown origin
  source 1..12: mol_type = other RNA
gctttgccatag

SEQ ID NO: 540 - RNA, 10 nt, synthetic construct
  misc_feature 1..10: note = Synthetic sequence or unknown origin
  source 1..10: mol_type = other RNA
gctttgccat

SEQ ID NO: 541 - RNA, 15 nt, synthetic construct
  misc_feature 1..15: note = Synthetic sequence or unknown origin
  source 1..15: mol_type = other RNA
gaactatgacaaagt

SEQ ID NO: 542 - RNA, 15 nt, synthetic construct
  misc_feature 1..15: note = Synthetic sequence or unknown origin
  source 1..15: mol_type = other RNA
gaactatgacaaagt

SEQ ID NO: 543 - RNA, 12 nt, synthetic construct
  misc_feature 1..12: note = Synthetic sequence or unknown origin
  source 1..12: mol_type = other RNA
ctatgacaaagt

SEQ ID NO: 544 - RNA, 10 nt, synthetic construct
  misc_feature 1..10: note = Synthetic sequence or unknown origin
  source 1..10: mol_type = other RNA
atgacaaagt

SEQ ID NO: 545 - RNA, 63 nt, synthetic construct
  misc_feature 1..63: note = Synthetic sequence or unknown origin
  source 1..63: mol_type = other RNA
tagataacgcagaccgcgtccctaaccgccatgcggttacaccgtgttaaaaagcgttgttta

SEQ ID NO: 546 - RNA, 63 nt, synthetic construct; identical to SEQ ID NO: 545
  misc_feature 1..63: note = Synthetic sequence or unknown origin
  source 1..63: mol_type = other RNA

SEQ ID NO: 547 - RNA, 33 nt, synthetic construct
  misc_feature 1..33: note = Synthetic sequence or unknown origin
  source 1..33: mol_type = other RNA
agaggtgcgacttcacggttgcgcctctttttt

SEQ ID NO: 548 - RNA, 28 nt, synthetic construct
  misc_feature 1..28: note = Synthetic sequence or unknown origin
  source 1..28: mol_type = other RNA
agaggtgcgacttcacggttgcgcctct

SEQ ID NO: 549 - RNA, 27 nt, synthetic construct
  misc_feature 1..27: note = Synthetic sequence or unknown origin
  source 1..27: mol_type = other RNA
agaggtgcgacttcacggttgcgcctc

SEQ ID NO: 550 - RNA, 148 nt, synthetic construct
  misc_feature 1..148: note = Synthetic sequence or unknown origin
  source 1..148: mol_type = other RNA
gttatcgcttcctttgaaaaaaggaagccgataataatcgaaacgaaagttttccgagtggggctccggcgatccggtcttgtatcggggtagccgtcccctcagaagaaaagggggctgaccgcgcgtcgcccccttttcatttttt

SEQ ID NO: 551 - RNA, 15 nt, synthetic construct
  misc_feature 1..15: note = Synthetic sequence or unknown origin
  source 1..15: mol_type = other RNA
gttatcgcttccttt

SEQ ID NO: 552 - RNA, 12 nt, synthetic construct
  misc_feature 1..12: note = Synthetic sequence or unknown origin
  source 1..12: mol_type = other RNA
gttatcgcttcc

SEQ ID NO: 553 - RNA, 10 nt, synthetic construct
  misc_feature 1..10: note = Synthetic sequence or unknown origin
  source 1..10: mol_type = other RNA
gttatcgctt

SEQ ID NO: 554 - RNA, 16 nt, synthetic construct
  misc_feature 1..16: note = Synthetic sequence or unknown origin
  source 1..16: mol_type = other RNA
aaaggaagccgataat

SEQ ID NO: 555 - RNA, 13 nt, synthetic construct
  misc_feature 1..13: note = Synthetic sequence or unknown origin
  source 1..13: mol_type = other RNA
ggaagccgataat

SEQ ID NO: 556 - RNA, 11 nt, synthetic construct
  misc_feature 1..11: note = Synthetic sequence or unknown origin
  source 1..11: mol_type = other RNA
aagccgataat

SEQ ID NO: 557 - RNA, 20 nt, synthetic construct
  misc_feature 1..20: note = Synthetic sequence or unknown origin
  source 1..20: mol_type = other RNA
aatcgaaacgaaagttttcc

SEQ ID NO: 558 - RNA, 18 nt, synthetic construct
  misc_feature 1..18: note = Synthetic sequence or unknown origin
  source 1..18: mol_type = other RNA
aatcgaaacgaaagtttt

SEQ ID NO: 559 - RNA, 52 nt, synthetic construct
  misc_feature 1..52: note = Synthetic sequence or unknown origin
  source 1..52: mol_type = other RNA
gagtggggctccggcgatccggtcttgtatcggggtagccgtcccctcagaa

SEQ ID NO: 560 - RNA, 48 nt, synthetic construct
  misc_feature 1..48: note = Synthetic sequence or unknown origin
  source 1..48: mol_type = other RNA
gagtggggctccggcgatccggtcttgtatcggggtagccgtcccctc

SEQ ID NO: 561 - RNA, 41 nt, synthetic construct
  misc_feature 1..41: note = Synthetic sequence or unknown origin
  source 1..41: mol_type = other RNA
gaaaagggggctgaccgcgcgtcgcccccttttcatttttt

SEQ ID NO: 562 - RNA, 34 nt, synthetic construct
  misc_feature 1..34: note = Synthetic sequence or unknown origin
  source 1..34: mol_type = other RNA
gaaaagggggctgaccgcgcgtcgcccccttttc

SEQ ID NO: 563 - RNA, 35 nt, synthetic construct
  misc_feature 1..35: note = Synthetic sequence or unknown origin
  source 1..35: mol_type = other RNA
gaaaagggggctgaccgcgcgtcgcccccttttca

SEQ ID NO: 564 - RNA, 148 nt, synthetic construct
  misc_feature 1..148: note = Synthetic sequence or unknown origin
  source 1..148: mol_type = other RNA
gttatcgcttcctttgaaaaaaggaagccgataataatcgaaacgaaagtttcccgagtggggctccggcgatccggtcttgtatcggggtagccgtcccctcagaagagaagggggctgaccgcgcgtcgcccccttctcatttttt

SEQ ID NO: 565 - RNA, 20 nt, synthetic construct
  misc_feature 1..20: note = Synthetic sequence or unknown origin
  source 1..20: mol_type = other RNA
aatcgaaacgaaagtttccc

SEQ ID NO: 566 - RNA, 18 nt, synthetic construct
  misc_feature 1..18: note = Synthetic sequence or unknown origin
  source 1..18: mol_type = other RNA
aatcgaaacgaaagtttc

SEQ ID NO: 567 - RNA, 41 nt, synthetic construct
  misc_feature 1..41: note = Synthetic sequence or unknown origin
  source 1..41: mol_type = other RNA
gagaagggggctgaccgcgcgtcgcccccttctcatttttt

SEQ ID NO: 568 - RNA, 34 nt, synthetic construct
  misc_feature 1..34: note = Synthetic sequence or unknown origin
  source 1..34: mol_type = other RNA
gagaagggggctgaccgcgcgtcgcccccttctc

SEQ ID NO: 569 - RNA, 35 nt, synthetic construct
  misc_feature 1..35: note = Synthetic sequence or unknown origin
  source 1..35: mol_type = other RNA
gagaagggggctgaccgcgcgtcgcccccttctca

SEQ ID NO: 570 - RNA, 142 nt, synthetic construct
  misc_feature 1..142: note = Synthetic sequence or unknown origin
  source 1..142: mol_type = other RNA
gttatcgcttcctttgaaaaaaggaagccgataataatcgaaacgaaagttttccgagtggggctccggcgatccggtcttgtatcggggtagccgtcccctcagaagaaaagggggctgaccgcgcgtcgccccctttttt

SEQ ID NO: 571 - RNA, 51 nt, synthetic construct
  misc_feature 1..51: note = Synthetic sequence or unknown origin
  source 1..51: mol_type = other RNA
gagtggggctccggcgatccggtcttgtatcggggtagccgtcccctcaga

SEQ ID NO: 572 - RNA, 36 nt, synthetic construct
  misc_feature 1..36: note = Synthetic sequence or unknown origin
  source 1..36: mol_type = other RNA
agaaaagggggctgaccgcgcgtcgccccctttttt

SEQ ID NO: 573 - RNA, 36 nt, synthetic construct; identical to SEQ ID NO: 572
  misc_feature 1..36: note = Synthetic sequence or unknown origin
  source 1..36: mol_type = other RNA

SEQ ID NO: 574 - RNA, 30 nt, synthetic construct
  misc_feature 1..30: note = Synthetic sequence or unknown origin
  source 1..30: mol_type = other RNA
agaaaagggggctgaccgcgcgtcgccccc

SEQ ID NO: 575 - RNA, 142 nt, synthetic construct
  misc_feature 1..142: note = Synthetic sequence or unknown origin
  source 1..142: mol_type = other RNA
gttatcgcttcctttgaaaaaaggaagccgataataatcgaaacgaaagtttcccgagtggggctccggcgatccggtcttgtatcggggtagccgtcccctcagaagaaaagggggctgaccgcgcgtcgccccctttttt

SEQ ID NO: 576 - RNA, 105 nt, synthetic construct
  misc_feature 1..105: note = Synthetic sequence or unknown origin
  source 1..105: mol_type = other RNA
gttgtagttccctatttatgaaagtaaataggttactacaataaggcccttgcgcaagcatggtgccgcaactggaaggtgctgtgcgagtcacggcactttttt

SEQ ID NO: 577 - RNA, 19 nt, synthetic construct
  misc_feature 1..19: note = Synthetic sequence or unknown origin
  source 1..19: mol_type = other RNA
gttgtagttccctatttat

SEQ ID NO: 578 - RNA, 15 nt, synthetic construct
  misc_feature 1..15: note = Synthetic sequence or unknown origin
  source 1..15: mol_type = other RNA
gttgtagttccctat

SEQ ID NO: 579 - RNA, 12 nt, synthetic construct
  misc_feature 1..12: note = Synthetic sequence or unknown origin
  source 1..12: mol_type = other RNA
gttgtagttccc

SEQ ID NO: 580 - RNA, 10 nt, synthetic construct
  misc_feature 1..10: note = Synthetic sequence or unknown origin
  source 1..10: mol_type = other RNA
gttgtagttc

SEQ ID NO: 581 - RNA, 19 nt, synthetic construct
  misc_feature 1..19: note = Synthetic sequence or unknown origin
  source 1..19: mol_type = other RNA
gtaaataggttactacaat

SEQ ID NO: 582 - RNA, 15 nt, synthetic construct
  misc_feature 1..15: note = Synthetic sequence or unknown origin
  source 1..15: mol_type = other RNA
ataggttactacaat

SEQ ID NO: 583 - RNA, 12 nt, synthetic construct
  misc_feature 1..12: note = Synthetic sequence or unknown origin
  source 1..12: mol_type = other RNA
ggttactacaat

SEQ ID NO: 584 - RNA, 10 nt, synthetic construct
  misc_feature 1..10: note = Synthetic sequence or unknown origin
  source 1..10: mol_type = other RNA
ttactacaat

SEQ ID NO: 585 - RNA, 31 nt, synthetic construct
  misc_feature 1..31: note = Synthetic sequence or unknown origin
  source 1..31: mol_type = other RNA
aaggcccttgcgcaagcatggtgccgcaact

SEQ ID NO: 586 - RNA, 25 nt, synthetic construct
  misc_feature 1..25: note = Synthetic sequence or unknown origin
  source 1..25: mol_type = other RNA
aaggcccttgcgcaagcatggtgcc

SEQ ID NO: 587 - RNA, 32 nt, synthetic construct
  misc_feature 1..32: note = Synthetic sequence or unknown origin
  source 1..32: mol_type = other RNA
ggaaggtgctgtgcgagtcacggcactttttt

SEQ ID NO: 588 - RNA, 31 nt, synthetic construct
  misc_feature 1..31: note = Synthetic sequence or unknown origin
  source 1..31: mol_type = other RNA
ggaaggtgctgtgcgagtcacggcacttttt

SEQ ID NO: 589 - RNA, 26 nt, synthetic construct
  misc_feature 1..26: note = Synthetic sequence or unknown origin
  source 1..26: mol_type = other RNA
ggaaggtgctgtgcgagtcacggcac

SEQ ID NO: 590 - RNA, 111 nt, synthetic construct
  misc_feature 1..111: note = Synthetic sequence or unknown origin
  source 1..111: mol_type = other RNA
gttgtagttccctatttatgaaagtaaataggttactacaataaggcccttgcgcaagcatggtgccgcaactggaaggtgctgtgcgagtcacggcacttttgctttttt

SEQ ID NO: 591 - RNA, 25 nt, synthetic construct
  misc_feature 1..25: note = Synthetic sequence or unknown origin
  source 1..25: mol_type = other RNA
aaggcccttgcgcaagcatggtgcc

SEQ ID NO: 592 - RNA, 44 nt, synthetic construct
  misc_feature 1..44: note = Synthetic sequence or unknown origin
  source 1..44: mol_type = other RNA
gcaactggaaggtgctgtgcgagtcacggcacttttgctttttt

SEQ ID NO: 593 - RNA, 38 nt, synthetic construct
  misc_feature 1..38: note = Synthetic sequence or unknown origin
  source 1..38: mol_type = other RNA
gcaactggaaggtgctgtgcgagtcacggcacttttgc

SEQ ID NO: 594 - RNA, 38 nt, synthetic construct; identical to SEQ ID NO: 593
  misc_feature 1..38: note = Synthetic sequence or unknown origin
  source 1..38: mol_type = other RNA

SEQ ID NO: 595 - RNA, 111 nt, synthetic construct
  misc_feature 1..111: note = Synthetic sequence or unknown origin
  source 1..111: mol_type = other RNA
gttgtagttccctatttatgaaagtaaataggttactacaataaggcccttgcgcaagcatggtgccgcaactggaaggtgctgtgcgagtcacggcacctttgctttttt

SEQ ID NO: 596 - RNA, 44 nt, synthetic construct
  misc_feature 1..44: note = Synthetic sequence or unknown origin
  source 1..44: mol_type = other RNA
gcaactggaaggtgctgtgcgagtcacggcacctttgctttttt

SEQ ID NO: 597 - RNA, 38 nt, synthetic construct
  misc_feature 1..38: note = Synthetic sequence or unknown origin
  source 1..38: mol_type = other RNA
gcaactggaaggtgctgtgcgagtcacggcacctttgc

SEQ ID NO: 598 - RNA, 38 nt, synthetic construct; identical to SEQ ID NO: 597
  misc_feature 1..38: note = Synthetic sequence or unknown origin
  source 1..38: mol_type = other RNA

SEQ ID NO: 599 - RNA, 99 nt, synthetic construct
  misc_feature 1..99: note = Synthetic sequence or unknown origin
  source 1..99: mol_type = other RNA
gttatactttgctacttaagaaattaagtagcttagtataataagtgaaaaacgcgaagtttgccctatacgttattgtatggggtatcttcttttttt

SEQ ID NO: 600 - RNA, 19 nt, synthetic construct
  misc_feature 1..19: note = Synthetic sequence or unknown origin
  source 1..19: mol_type = other RNA
gttatactttgctacttaa

SEQ ID NO: 601 - RNA, 15 nt, synthetic construct
  misc_feature 1..15: note = Synthetic sequence or unknown origin
  source 1..15: mol_type = other RNA
gttatactttgctac

SEQ ID NO: 602 - RNA, 12 nt, synthetic construct
  misc_feature 1..12: note = Synthetic sequence or unknown origin
  source 1..12: mol_type = other RNA
gttatactttgc

SEQ ID NO: 603 - RNA, 10 nt, synthetic construct
  misc_feature 1..10: note = Synthetic sequence or unknown origin
  source 1..10: mol_type = other RNA
gttatacttt

SEQ ID NO: 604 - RNA, 19 nt, synthetic construct
  misc_feature 1..19: note = Synthetic sequence or unknown origin
  source 1..19: mol_type = other RNA
ttaagtagcttagtataat

SEQ ID NO: 605 - RNA, 15 nt, synthetic construct
  misc_feature 1..15: note = Synthetic sequence or unknown origin
  source 1..15: mol_type = other RNA
gtagcttagtataat

SEQ ID NO: 606 - RNA, 12 nt, synthetic construct
  misc_feature 1..12: note = Synthetic sequence or unknown origin
  source 1..12: mol_type = other RNA
gcttagtataat

SEQ ID NO: 607 - RNA, 10 nt, synthetic construct
  misc_feature 1..10: note = Synthetic sequence or unknown origin
  source 1..10: mol_type = other RNA
ttagtataat

SEQ ID NO: 608 - RNA, 13 nt, synthetic construct
  misc_feature 1..13: note = Synthetic sequence or unknown origin
  source 1..13: mol_type = other RNA
aagtgaaaaacgc

SEQ ID NO: 609 - RNA, 13 nt, synthetic construct
  misc_feature 1..13: note = Synthetic sequence or unknown origin
  source 1..13: mol_type = other RNA
aagtgaaaaacgc

SEQ ID NO: 610 - RNA, 44 nt, synthetic construct
  misc_feature 1..44: note = Synthetic sequence or unknown origin
  source 1..44: mol_type = other RNA
gaagtttgccctatacgttattgtatggggtatcttcttttttt

SEQ ID NO: 611 - RNA, 37 nt, synthetic construct
  misc_feature 1..37: note = Synthetic sequence or unknown origin
  source 1..37: mol_type = other RNA
gaagtttgccctatacgttattgtatggggtatcttc

SEQ ID NO: 612 - RNA, 37 nt, synthetic construct; identical to SEQ ID NO: 611
  misc_feature 1..37: note = Synthetic sequence or unknown origin
  source 1..37: mol_type = other RNA

SEQ ID NO: 613 - RNA, 115 nt, synthetic construct
  misc_feature 1..115: note = Synthetic sequence or unknown origin
  source 1..115: mol_type = other RNA
gctatgttttgaagggaatgaaaatttctctcttaacatagtaaggagttatgctccgtgcgtgtagccgattaggtgaaacgaagcgcctcccagtggggcgcataaatttttt

SEQ ID NO: 614 - RNA, 19 nt, synthetic construct
  misc_feature 1..19: note = Synthetic sequence or unknown origin
  source 1..19: mol_type = other RNA
gctatgttttgaagggaat

SEQ ID NO: 615 - RNA, 15 nt, synthetic construct
  misc_feature 1..15: note = Synthetic sequence or unknown origin
  source 1..15: mol_type = other RNA
gctatgttttgaagg

SEQ ID NO: 616 - RNA, 12 nt, synthetic construct
  misc_feature 1..12: note = Synthetic sequence or unknown origin
  source 1..12: mol_type = other RNA
gctatgttttga

SEQ ID NO: 617 - RNA, 10 nt, synthetic construct
  misc_feature 1..10: note = Synthetic sequence or unknown origin
  source 1..10: mol_type = other RNA
gctatgtttt

SEQ ID NO: 618 - RNA, 19 nt, synthetic construct
  misc_feature 1..19: note = Synthetic sequence or unknown origin
  source 1..19: mol_type = other RNA
atttctctcttaacatagt

SEQ ID NO: 619 - RNA, 14 nt, synthetic construct
  misc_feature 1..14: note = Synthetic sequence or unknown origin
  source 1..14: mol_type = other RNA
tctcttaacatagt

SEQ ID NO: 620 - RNA, 11 nt, synthetic construct
  misc_feature 1..11: note = Synthetic sequence or unknown origin
  source 1..11: mol_type = other RNA
cttaacatagt

SEQ ID NO: 621 - RNA, 10 nt, synthetic construct
  misc_feature 1..10: note = Synthetic sequence or unknown origin
  source 1..10: mol_type = other RNA
ttaacatagt

SEQ ID NO: 622 - RNA, 18 nt, synthetic construct
  misc_feature 1..18: note = Synthetic sequence or unknown origin
  source 1..18: mol_type = other RNA
aaggagttatgctccgtg

SEQ ID NO: 623 - RNA, 15 nt, synthetic construct
  misc_feature 1..15: note = Synthetic sequence or unknown origin
  source 1..15: mol_type = other RNA
aaggagttatgctcc

SEQ ID NO: 624 - RNA, 25 nt, synthetic construct
  misc_feature 1..25: note = Synthetic sequence or unknown origin
  source 1..25: mol_type = other RNA
cgtgtagccgattaggtgaaacgaa

SEQ ID NO: 625 - RNA, 23 nt, synthetic construct
  misc_feature 1..23: note = Synthetic sequence or unknown origin
  source 1..23: mol_type = other RNA
cgtgtagccgattaggtgaaacg

SEQ ID NO: 626 - RNA, 30 nt, synthetic construct
  misc_feature 1..30: note = Synthetic sequence or unknown origin
  source 1..30: mol_type = other RNA
gcgcctcccagtggggcgcataaatttttt

SEQ ID NO: 627 - RNA, 19 nt, synthetic construct
  misc_feature 1..19: note = Synthetic sequence or unknown origin
  source 1..19: mol_type = other RNA
gcgcctcccagtggggcgc

SEQ ID NO: 628 - RNA, 24 nt, synthetic construct
  misc_feature 1..24: note = Synthetic sequence or unknown origin
  source 1..24: mol_type = other RNA
gcgcctcccagtggggcgcataaa

SEQ ID NO: 629 - RNA, 115 nt, synthetic construct
  misc_feature 1..115: note = Synthetic sequence or unknown origin
  source 1..115: mol_type = other RNA
gctatgttctgaagggaatgaaaatttctctcttaacatagtaaggagttatgctccgtgcgtgtagccgattaggtgaaacgaagcgcctcccagtggggcgcataaatttttt

SEQ ID NO: 630 - RNA, 19 nt, synthetic construct
  misc_feature 1..19: note = Synthetic sequence or unknown origin
  source 1..19: mol_type = other RNA
gctatgttctgaagggaat

SEQ ID NO: 631 - RNA, 15 nt, synthetic construct
  misc_feature 1..15: note = Synthetic sequence or unknown origin
  source 1..15: mol_type = other RNA
gctatgttctgaagg

SEQ ID NO: 632 - RNA, 12 nt, synthetic construct
  misc_feature 1..12: note = Synthetic sequence or unknown origin
  source 1..12: mol_type = other RNA
gctatgttctga

SEQ ID NO: 633 - RNA, 10 nt, synthetic construct
  misc_feature 1..10: note = Synthetic sequence or unknown origin
  source 1..10: mol_type = other RNA
gctatgttct

SEQ ID NO: 634 - RNA, 98 nt, synthetic construct
  misc_feature 1..98: note = Synthetic sequence or unknown origin
  source 1..98: mol_type = other RNA
gttgtagttccctttcagtgaaaactgcaaggttgctacaataaggtagtataccgcaaagctctggcgctctgcttttgcagggcgccatctttttt

SEQ ID NO: 635 - RNA, 19 nt, synthetic construct
  misc_feature 1..19: note = Synthetic sequence or unknown origin
  source 1..19: mol_type = other RNA
gttgtagttccctttcagt

SEQ ID NO: 636 - RNA, 15 nt, synthetic construct
  misc_feature 1..15: note = Synthetic sequence or unknown origin
  source 1..15: mol_type = other RNA
gttgtagttcccttt

SEQ ID NO: 637 - RNA, 12 nt, synthetic construct
  misc_feature 1..12: note = Synthetic sequence or unknown origin
  source 1..12: mol_type = other RNA
gttgtagttccc

SEQ ID NO: 638 - RNA, 10 nt, synthetic construct
  misc_feature 1..10: note = Synthetic sequence or unknown origin
  source 1..10: mol_type = other RNA
gttgtagttc

SEQ ID NO: 639 - RNA, 19 nt, synthetic construct
  misc_feature 1..19: note = Synthetic sequence or unknown origin
  source 1..19: mol_type = other RNA
actgcaaggttgctacaat

SEQ ID NO: 640 - RNA, 15 nt, synthetic construct
  misc_feature 1..15: note = Synthetic sequence or unknown origin
  source 1..15: mol_type = other RNA
caaggttgctacaat

SEQ ID NO: 641 - RNA, 12 nt, synthetic construct
  misc_feature 1..12: note = Synthetic sequence or unknown origin
  source 1..12: mol_type = other RNA
ggttgctacaat

SEQ ID NO: 642 - RNA, 10 nt, synthetic construct
  misc_feature 1..10: note = Synthetic sequence or unknown origin
  source 1..10: mol_type = other RNA
ttgctacaat

SEQ ID NO: 643 - RNA, 15 nt, synthetic construct
  misc_feature 1..15: note = Synthetic sequence or unknown origin
  source 1..15: mol_type = other RNA
aaggtagtataccgc

SEQ ID NO: 644 - RNA, 13 nt, synthetic construct
  misc_feature 1..13: note = Synthetic sequence or unknown origin
  source 1..13: mol_type = other RNA
aaggtagtatacc

SEQ ID NO: 645 - RNA, 41 nt, synthetic construct
  misc_feature 1..41: note = Synthetic sequence or unknown origin
  source 1..41: mol_type = other RNA
aaagctctggcgctctgcttttgcagggcgccatctttttt

SEQ ID NO: 646 - RNA, 38 nt, synthetic construct
  misc_feature 1..38: note = Synthetic sequence or unknown origin
  source 1..38: mol_type = other RNA
aaagctctggcgctctgcttttgcagggcgccatcttt

SEQ ID NO: 647 - RNA, 35 nt, synthetic construct
  misc_feature 1..35: note = Synthetic sequence or unknown origin
  source 1..35: mol_type = other RNA
aaagctctggcgctctgcttttgcagggcgccatc

SEQ ID NO: 648 - RNA, 98 nt, synthetic construct
  misc_feature 1..98: note = Synthetic sequence or unknown origin
  source 1..98: mol_type = other RNA
gttgtagttccctttcagtgaaaactgcaaggttgctacaataaggtagtataccgcaaagctctggcgctctgcttctgcagggcgccatctttttt

SEQ ID NO: 649 - RNA, 41 nt, synthetic construct
  misc_feature 1..41: note = Synthetic sequence or unknown origin
  source 1..41: mol_type = other RNA
aaagctctggcgctctgcttctgcagggcgccatctttttt

SEQ ID NO: 650 - RNA, 38 nt, synthetic construct
  misc_feature 1..38: note = Synthetic sequence or unknown origin
  source 1..38: mol_type = other RNA
aaagctctggcgctctgcttctgcagggcgccatcttt

SEQ ID NO: 651 - RNA, 35 nt, synthetic construct
  misc_feature 1..35: note = Synthetic sequence or unknown origin
  source 1..35: mol_type = other RNA
aaagctctggcgctctgcttctgcagggcgccatc

SEQ ID NO: 652 - RNA, 98 nt, synthetic construct
  misc_feature 1..98: note = Synthetic sequence or unknown origin
  source 1..98: mol_type = other RNA
gttgtagctccctgacagtgaaaactgtcatggttgctacaataaggtagtataccgtaaagctctgacgccctgcttgcagggcgtcatcttttttt

SEQ ID NO: 653 - RNA, 19 nt, synthetic construct
  misc_feature 1..19: note = Synthetic sequence or unknown origin
  source 1..19: mol_type = other RNA
gttgtagctccctgacagt

SEQ ID NO: 654 - RNA, 15 nt, synthetic construct
  misc_feature 1..15: note = Synthetic sequence or unknown origin
  source 1..15: mol_type = other RNA
gttgtagctccctga

SEQ ID NO: 655 - RNA, 12 nt, synthetic construct
  misc_feature 1..12: note = Synthetic sequence or unknown origin
  source 1..12: mol_type = other RNA
gttgtagctccc

SEQ ID NO: 656 - RNA, 10 nt, synthetic construct
  misc_feature 1..10: note = Synthetic sequence or unknown origin
  source 1..10: mol_type = other RNA
gttgtagctc

SEQ ID NO: 657 - RNA, 20 nt, synthetic construct
  misc_feature 1..20: note = Synthetic sequence or unknown origin
  source 1..20: mol_type = other RNA
actgtcatggttgctacaat

SEQ ID NO: 658 - RNA, 16 nt, synthetic construct
  misc_feature 1..16: note = Synthetic sequence or unknown origin
  source 1..16: mol_type = other RNA
tcatggttgctacaat

SEQ ID NO: 659 - RNA, 13 nt, synthetic construct
  misc_feature 1..13: note = Synthetic sequence or unknown origin
  source 1..13: mol_type = other RNA
tggttgctacaat

SEQ ID NO: 660 - RNA, 10 nt, synthetic construct
  misc_feature 1..10: note = Synthetic sequence or unknown origin
  source 1..10: mol_type = other RNA
ttgctacaat

SEQ ID NO: 661 - RNA, 15 nt, synthetic construct
  misc_feature 1..15: note = Synthetic sequence or unknown origin
  source 1..15: mol_type = other RNA
aaggtagtataccgt

SEQ ID NO: 662 - RNA, 13 nt, synthetic construct
  misc_feature 1..13: note = Synthetic sequence or unknown origin
  source 1..13: mol_type = other RNA
aaggtagtatacc

SEQ ID NO: 663 - RNA, 40 nt, synthetic construct
  misc_feature 1..40: note = Synthetic sequence or unknown origin
  source 1..40: mol_type = other RNA
aaagctctgacgccctgcttgcagggcgtcatcttttttt

SEQ ID NO: 664 - RNA, 36 nt, synthetic construct
  misc_feature 1..36: note = Synthetic sequence or unknown origin
  source 1..36: mol_type = other RNA
aaagctctgacgccctgcttgcagggcgtcatcttt

SEQ ID NO: 665 - RNA, 33 nt, synthetic construct
  misc_feature 1..33: note = Synthetic sequence or unknown origin
  source 1..33: mol_type = other RNA
aaagctctgacgccctgcttgcagggcgtcatc

SEQ ID NO: 666 - RNA, 98 nt, synthetic construct
  misc_feature 1..98: note = Synthetic sequence or unknown origin
  source 1..98: mol_type = other RNA
attgtagttccctaattttgaaaacaaattaggttgctacaaaaaggtagaaaaccgaaaagctctgacggctcctttttggagccgttatctttttt

SEQ ID NO: 667 - RNA, 19 nt, synthetic construct
  misc_feature 1..19: note = Synthetic sequence or unknown origin
  source 1..19: mol_type = other RNA
attgtagttccctaatttt

SEQ ID NO: 668 - RNA, 15 nt, synthetic construct
  misc_feature 1..15: note = Synthetic sequence or unknown origin
  source 1..15: mol_type = other RNA
attgtagttccctaa

SEQ ID NO: 669 - RNA, 12 nt, synthetic construct
  misc_feature 1..12: note = Synthetic sequence or unknown origin
  source 1..12: mol_type = other RNA
attgtagttccc

SEQ ID NO: 670 - RNA, 10 nt, synthetic construct
  misc_feature 1..10: note = Synthetic sequence or unknown origin
  source 1..10: mol_type = other RNA
attgtagttc

SEQ ID NO: 671 - RNA, 19 nt, synthetic construct
  misc_feature 1..19: note = Synthetic sequence or unknown origin
  source 1..19: mol_type = other RNA
acaaattaggttgctacaa

SEQ ID NO: 672 - RNA, 14 nt, synthetic construct
  misc_feature 1..14: note = Synthetic sequence or unknown origin
  source 1..14: mol_type = other RNA
ttaggttgctacaa

SEQ ID NO: 673 - RNA, 11 nt, synthetic construct
  misc_feature 1..11: note = Synthetic sequence or unknown origin
  source 1..11: mol_type = other RNA
ggttgctacaa

SEQ ID NO: 674 - RNA, 14 nt, synthetic construct
  misc_feature 1..14: note = Synthetic sequence or unknown origin
  source 1..14: mol_type = other RNA
aaaggtagaaaacc

SEQ ID NO: 675 - RNA, 14 nt, synthetic construct
  misc_feature 1..14: note = Synthetic sequence or unknown origin
  source 1..14: mol_type = other RNA
aaaggtagaaaacc

SEQ ID NO: 676 - RNA, 42 nt, synthetic construct
  misc_feature 1..42: note = Synthetic sequence or unknown origin
  source 1..42: mol_type = other RNA
gaaaagctctgacggctcctttttggagccgttatctttttt

SEQ ID NO: 677 - RNA, 41 nt, synthetic construct
  misc_feature 1..41: note = Synthetic sequence or unknown origin
  source 1..41: mol_type = other RNA
gaaaagctctgacggctcctttttggagccgttatcttttt

SEQ ID NO: 678 - RNA, 36 nt, synthetic construct
  misc_feature 1..36: note = Synthetic sequence or unknown origin
  source 1..36: mol_type = other RNA
gaaaagctctgacggctcctttttggagccgttatc

SEQ ID NO: 679 - RNA, 98 nt, synthetic construct
  misc_feature 1..98: note = Synthetic sequence or unknown origin
  source 1..98: mol_type = other RNA
attgtagttccctaatttcgaaaacaaattaggttgctacaaaaaggtagaaaaccgaaaagctctgacggctccttcttggagccgttatctttttt

SEQ ID NO: 680 - RNA, 19 nt, synthetic construct
  misc_feature 1..19: note = Synthetic sequence or unknown origin
  source 1..19: mol_type = other RNA
attgtagttccctaatttc

SEQ ID NO: 681 - RNA, 42 nt, synthetic construct
  misc_feature 1..42: note = Synthetic sequence or unknown origin
  source 1..42: mol_type = other RNA
gaaaagctctgacggctccttcttggagccgttatctttttt

SEQ ID NO: 682 - RNA, 41 nt, synthetic construct
  misc_feature 1..41: note = Synthetic sequence or unknown origin
  source 1..41: mol_type = other RNA
gaaaagctctgacggctccttcttggagccgttatcttttt

SEQ ID NO: 683 - RNA, 36 nt, synthetic construct
  misc_feature 1..36: note = Synthetic sequence or unknown origin
  source 1..36: mol_type = other RNA
gaaaagctctgacggctccttcttggagccgttatc

SEQ ID NO: 684 - RNA, 98 nt, synthetic construct
  misc_feature 1..98: note = Synthetic sequence or unknown origin
  source 1..98: mol_type = other RNA
gttgtagttccctgacagtgaaaactgttatggttactacaataaggtagtacaccgtagagctctgacgccctgctcgcagggcgtcatcttttttt

SEQ ID NO: 685 - RNA, 19 nt, synthetic construct
  misc_feature 1..19: note = Synthetic sequence or unknown origin
  source 1..19: mol_type = other RNA
gttgtagttccctgacagt

SEQ ID NO: 686 - RNA, 15 nt, synthetic construct
  misc_feature 1..15: note = Synthetic sequence or unknown origin
  source 1..15: mol_type = other RNA
gttgtagttccctga

SEQ ID NO: 687 - RNA, 12 nt, synthetic construct
  misc_feature 1..12: note = Synthetic sequence or unknown origin
  source 1..12: mol_type = other RNA
gttgtagttccc

SEQ ID NO: 688 - RNA, 10 nt, synthetic construct
  misc_feature 1..10: note = Synthetic sequence or unknown origin
  source 1..10: mol_type = other RNA
gttgtagttc

SEQ ID NO: 689 - RNA, 20 nt, synthetic construct
  misc_feature 1..20: note = Synthetic sequence or unknown origin
  source 1..20: mol_type = other RNA
actgttatggttactacaat

SEQ ID NO: 690 - RNA, 16 nt, synthetic construct
  misc_feature 1..16: note = Synthetic sequence or unknown origin
  source 1..16: mol_type = other RNA
ttatggttactacaat

SEQ ID NO: 691 - RNA, 13 nt, synthetic construct
  misc_feature 1..13: note = Synthetic sequence or unknown origin
  source 1..13: mol_type = other RNA
tggttactacaat

SEQ ID NO: 692 - RNA, 10 nt, synthetic construct
  misc_feature 1..10: note = Synthetic sequence or unknown origin
  source 1..10: mol_type = other RNA
ttactacaat

SEQ ID NO: 693 - RNA, 22 nt, synthetic construct
  misc_feature 1..22: note = Synthetic sequence or unknown origin
  source 1..22: mol_type = other RNA
aaggtagtacaccgtagagctc

SEQ ID NO: 694 - RNA, 21 nt, synthetic construct
  misc_feature 1..21: note = Synthetic sequence or unknown origin
  source 1..21: mol_type = other RNA
aaggtagtacaccgtagagct

SEQ ID NO: 695 - RNA, 33 nt, synthetic construct
  misc_feature 1..33: note = Synthetic sequence or unknown origin
  source 1..33: mol_type = other RNA
tgacgccctgctcgcagggcgtcatcttttttt

SEQ ID NO: 696 - RNA, 24 nt, synthetic construct
  misc_feature 1..24: note = Synthetic sequence or unknown origin
  source 1..24: mol_type = other RNA
tgacgccctgctcgcagggcgtca

SEQ ID NO: 697 - RNA, 26 nt, synthetic construct
  misc_feature 1..26: note = Synthetic sequence or unknown origin
  source 1..26: mol_type = other RNA
tgacgccctgctcgcagggcgtcatc

SEQ ID NO: 698 - RNA, 111 nt, synthetic construct
  misc_feature 1..111: note = Synthetic sequence or unknown origin
  source 1..111: mol_type = other RNA
gttgtagttccctgacagtgaaaactgttatggttactacaataaggtagtacaccgtagagctctgacgccctgctcgcagggcgtcatctttttttacagtaatttttt

SEQ ID NO: 699 - RNA, 13 nt, synthetic construct
  misc_feature 1..13: note = Synthetic sequence or unknown origin
  source 1..13: mol_type = other RNA
aaggtagtacacc

SEQ ID NO: 700 - RNA, 13 nt, synthetic construct
  misc_feature 1..13: note = Synthetic sequence or unknown origin
  source 1..13: mol_type = other RNA
aaggtagtacacc

SEQ ID NO: 701 - RNA, 55 nt, synthetic construct
  misc_feature 1..55: note = Synthetic sequence or unknown origin
  source 1..55: mol_type = other RNA
gtagagctctgacgccctgctcgcagggcgtcatctttttttacagtaatttttt

SEQ ID NO: 702 - RNA, 44 nt, synthetic construct
  misc_feature 1..44: note = Synthetic sequence or unknown origin
  source 1..44: mol_type = other RNA
gtagagctctgacgccctgctcgcagggcgtcatctttttttac

SEQ ID NO: 703 - RNA, 49 nt, synthetic construct
  misc_feature 1..49: note = Synthetic sequence or unknown origin
  source 1..49: mol_type = other RNA
gtagagctctgacgccctgctcgcagggcgtcatctttttttacagtaa

SEQ ID NO: 704 - RNA, 111 nt, synthetic construct
  misc_feature 1..111: note = Synthetic sequence or unknown origin
  source 1..111: mol_type = other RNA
gttgtagttccctgacagtgaaaactgttatggttactacaataaggtagtacaccgtagagctctgacgccctgctcgcagggcgtcatctttctttacagtaatttttt

SEQ ID NO: 705 - RNA, 55 nt, synthetic construct
  misc_feature 1..55: note = Synthetic sequence or unknown origin
  source 1..55: mol_type = other RNA
gtagagctctgacgccctgctcgcagggcgtcatctttctttacagtaatttttt

SEQ ID NO: 706 - RNA, 44 nt, synthetic construct
  misc_feature 1..44: note = Synthetic sequence or unknown origin
  source 1..44: mol_type = other RNA
gtagagctctgacgccctgctcgcagggcgtcatctttctttac

SEQ ID NO: 707 - RNA, 49 nt, synthetic construct
  misc_feature 1..49: note = Synthetic sequence or unknown origin
  source 1..49: mol_type = other RNA
gtagagctctgacgccctgctcgcagggcgtcatctttctttacagtaa

SEQ ID NO: 708 - RNA, 116 nt, synthetic construct
  misc_feature 1..116: note = Synthetic sequence or unknown origin
  source 1..116: mol_type = other RNA
gttttagtcccttgttgaaaaacaagggactaaaataaggggagtgggcatcccgcagggtgatgcttgtgtcaagggggcaagctagtcaatccctaagcccacccgcatttttt

SEQ ID NO: 709 - RNA, 16 nt, synthetic construct
  misc_feature 1..16: note = Synthetic sequence or unknown origin
  source 1..16: mol_type = other RNA
gttttagtcccttgtt

SEQ ID NO: 710 - RNA, 15 nt, synthetic construct
  misc_feature 1..15: note = Synthetic sequence or unknown origin
  source 1..15: mol_type = other RNA
gttttagtcccttgt

SEQ ID NO: 711 - RNA, 12 nt, synthetic construct
  misc_feature 1..12: note = Synthetic sequence or unknown origin
  source 1..12: mol_type = other RNA
gttttagtccct

SEQ ID NO: 712 - RNA, 10 nt, synthetic construct
  misc_feature 1..10: note = Synthetic sequence or unknown origin
  source 1..10: mol_type = other RNA
gttttagtcc

SEQ ID NO: 713 - RNA, 16 nt, synthetic construct
  misc_feature 1..16: note = Synthetic sequence or unknown origin
  source 1..16: mol_type = other RNA
aacaagggactaaaat

SEQ ID NO: 714 - RNA, 15 nt, synthetic construct
  misc_feature 1..15: note = Synthetic sequence or unknown origin
  source 1..15: mol_type = other RNA
acaagggactaaaat

SEQ ID NO: 715 - RNA, 12 nt, synthetic construct
  misc_feature 1..12: note = Synthetic sequence or unknown origin
  source 1..12: mol_type = other RNA
agggactaaaat

SEQ ID NO: 716 - RNA, 10 nt, synthetic construct
  misc_feature 1..10: note = Synthetic sequence or unknown origin
  source 1..10: mol_type = other RNA
ggactaaaat

SEQ ID NO: 717 - RNA, 80 nt, synthetic construct
  misc_feature 1..80: note = Synthetic sequence or unknown origin
  source 1..80: mol_type = other RNA
aaggggagtgggcatcccgcagggtgatgcttgtgtcaagggggcaagctagtcaatccctaagcccacccgcatttttt

SEQ ID NO: 718 - RNA, 71 nt, synthetic construct
  misc_feature 1..71: note = Synthetic sequence or unknown origin
  source 1..71: mol_type = other RNA
ggggagtgggcatcccgcagggtgatgcttgtgtcaagggggcaagctagtcaatccctaagcccacccgc

SEQ ID NO: 719 - RNA, 74 nt, synthetic construct
  misc_feature 1..74: note = Synthetic sequence or unknown origin
  source 1..74: mol_type = other RNA
aaggggagtgggcatcccgcagggtgatgcttgtgtcaagggggcaagctagtcaatccctaagcccacccgca

SEQ ID NO: 720 - RNA, 116 nt, synthetic construct
  misc_feature 1..116: note = Synthetic sequence or unknown origin
  source 1..116: mol_type = other RNA
gttctagtcccttgttgaaaaacaagggactagaataaggggagtgggcatcccgcagggtgatgcttgtgtcaagggggcaagctagtcaatccctaagcccacccgcatttttt

SEQ ID NO: 721 - RNA, 16 nt, synthetic construct
  misc_feature 1..16: note = Synthetic sequence or unknown origin
  source 1..16: mol_type = other RNA
gttctagtcccttgtt

SEQ ID NO: 722 - RNA, 15 nt, synthetic construct
  misc_feature 1..15: note = Synthetic sequence or unknown origin
  source 1..15: mol_type = other RNA
gttctagtcccttgt

SEQ ID NO: 723 - RNA, 12 nt, synthetic construct
  misc_feature 1..12: note = Synthetic sequence or unknown origin
  source 1..12: mol_type = other RNA
gttctagtccct

SEQ ID NO: 724 - RNA, 10 nt, synthetic construct
  misc_feature 1..10: note = Synthetic sequence or unknown origin
  source 1..10: mol_type = other RNA
gttctagtcc

SEQ ID NO: 725 - RNA, 16 nt, synthetic construct
  misc_feature 1..16: note = Synthetic sequence or unknown origin
  source 1..16: mol_type = other RNA
aacaagggactagaat

SEQ ID NO: 726 - RNA, 15 nt, synthetic construct
  misc_feature 1..15: note = Synthetic sequence or unknown origin
  source 1..15: mol_type = other RNA
acaagggactagaat

SEQ ID NO: 727 - RNA, 12 nt, synthetic construct
  misc_feature 1..12: note = Synthetic sequence or unknown origin
  source 1..12: mol_type = other RNA
agggactagaat

SEQ ID NO: 728 - RNA, 10 nt, synthetic construct
  misc_feature 1..10: note = Synthetic sequence or unknown origin
  source 1..10: mol_type = other RNA
ggactagaat

SEQ ID NO: 729 - RNA, 119 nt, synthetic construct
  misc_feature 1..119: note = Synthetic sequence or unknown origin
  source 1..119: mol_type = other RNA
gttatagttcccgattattgaaaagtaattggtttctataataatcattgttattgattgtaagaatcaatgaagagtaaagtattccccttgttcttggagcaaggggtatctttttt

SEQ ID NO: 730 - RNA, 19 nt, synthetic construct
  misc_feature 1..19: note = Synthetic sequence or unknown origin
  source 1..19: mol_type = other RNA
gttatagttcccgattatt

SEQ ID NO: 731 - RNA, 15 nt, synthetic construct
  misc_feature 1..15: note = Synthetic sequence or unknown origin
  source 1..15: mol_type = other RNA
gttatagttcccgat

SEQ ID NO: 732 - RNA, 12 nt, synthetic construct
  misc_feature 1..12: note = Synthetic sequence or unknown origin
  source 1..12: mol_type = other RNA
gttatagttccc

SEQ ID NO: 733 - RNA, 10 nt, synthetic construct
  misc_feature 1..10: note = Synthetic sequence or unknown origin
  source 1..10: mol_type = other RNA
gttatagttc

SEQ ID NO: 734 - RNA, 19 nt, synthetic construct
  misc_feature 1..19: note = Synthetic sequence or unknown origin
  source 1..19: mol_type = other RNA
agtaattggtttctataat

SEQ ID NO: 735 - RNA, 15 nt, synthetic construct
  misc_feature 1..15: note = Synthetic sequence or unknown origin
  source 1..15: mol_type = other RNA
attggtttctataat

SEQ ID NO: 736 - RNA, 12 nt, synthetic construct
  misc_feature 1..12: note = Synthetic sequence or unknown origin
  source 1..12: mol_type = other RNA
ggtttctataat

SEQ ID NO: 737 - RNA, 10 nt, synthetic construct
  misc_feature 1..10: note = Synthetic sequence or unknown origin
  source 1..10: mol_type = other RNA
tttctataat

SEQ ID NO: 738 - RNA, 36 nt, synthetic construct
  misc_feature 1..36: note = Synthetic sequence or unknown origin
  source 1..36: mol_type = other RNA
aatcattgttattgattgtaagaatcaatgaagagt

SEQ ID NO: 739 - RNA, 31 nt, synthetic construct
  misc_feature 1..31: note = Synthetic sequence or unknown origin
  source 1..31: mol_type = other RNA
aatcattgttattgattgtaagaatcaatga

SEQ ID NO: 740 - RNA, 41 nt, synthetic construct
  misc_feature 1..41: note = Synthetic sequence or unknown origin
  source 1..41: mol_type = other RNA
aaagtattccccttgttcttggagcaaggggtatctttttt

SEQ ID NO: 741 - RNA, 38 nt, synthetic construct
  misc_feature 1..38: note = Synthetic sequence or unknown origin
  source 1..38: mol_type = other RNA
aaagtattccccttgttcttggagcaaggggtatcttt

SEQ ID NO: 742 - RNA, 35 nt, synthetic construct
  misc_feature 1..35: note = Synthetic sequence or unknown origin
  source 1..35: mol_type = other RNA
aaagtattccccttgttcttggagcaaggggtatc

SEQ ID NO: 743 - RNA, 107 nt, synthetic construct
  misc_feature 1..107: note = Synthetic sequence or unknown origin
  source 1..107: mol_type = other RNA
gttgtagttccctgatggtgaaaactgctcaggttactatgataaggtagtaaaccgaagagctctaatgccccgtctcgcacggggcattatctctaacatttttt

SEQ ID NO: 744 - RNA, 19 nt, synthetic construct
  misc_feature 1..19: note = Synthetic sequence or unknown origin
  source 1..19: mol_type = other RNA
gttgtagttccctgatggt

SEQ ID NO: 745 - RNA, 15 nt, synthetic construct
  misc_feature 1..15: note = Synthetic sequence or unknown origin
  source 1..15: mol_type = other RNA
gttgtagttccctga

SEQ ID NO: 746 - RNA, 12 nt, synthetic construct
  misc_feature 1..12: note = Synthetic sequence or unknown origin
  source 1..12: mol_type = other RNA
gttgtagttccc

SEQ ID NO: 747 - RNA, 10 nt, synthetic construct
  misc_feature 1..10: note = Synthetic sequence or unknown origin
  source 1..10: mol_type = other RNA
gttgtagttc

SEQ ID NO: 748 - RNA, 20 nt, synthetic construct
  misc_feature 1..20: note = Synthetic sequence or unknown origin
  source 1..20: mol_type = other RNA
actgctcaggttactatgat

SEQ ID NO: 749 - RNA, 16 nt, synthetic construct
  misc_feature 1..16: note = Synthetic sequence or unknown origin
  source 1..16: mol_type = other RNA
ctcaggttactatgat

SEQ ID NO: 750 - RNA, 12 nt, synthetic construct
  misc_feature 1..12: note = Synthetic sequence or unknown origin
  source 1..12: mol_type = other RNA
ggttactatgat

SEQ ID NO: 751 - RNA, 10 nt, synthetic construct
  misc_feature 1..10: note = Synthetic sequence or unknown origin
  source 1..10: mol_type = other RNA
ttactatgat

SEQ ID NO: 752 - RNA, 15 nt, synthetic construct
  misc_feature 1..15: note = Synthetic sequence or unknown origin
  source 1..15: mol_type = other RNA
aaggtagtaaaccga

SEQ ID NO: 753 - RNA, 13 nt, synthetic construct
  misc_feature 1..13: note = Synthetic sequence or unknown origin
  source 1..13: mol_type = other RNA
aaggtagtaaacc

SEQ ID NO: 754 - RNA, 49 nt, synthetic construct
  misc_feature 1..49: note = Synthetic sequence or unknown origin
  source 1..49: mol_type = other RNA
agagctctaatgccccgtctcgcacggggcattatctctaacatttttt

SEQ ID NO: 755 - RNA, 39 nt, synthetic construct
  misc_feature 1..39: note = Synthetic sequence or unknown origin
  source 1..39: mol_type = other RNA
agagctctaatgccccgtctcgcacggggcattatctct

SEQ ID NO: 756 - RNA, 43 nt, synthetic construct
  misc_feature 1..43: note = Synthetic sequence or unknown origin
  source 1..43: mol_type = other RNA
agagctctaatgccccgtctcgcacggggcattatctctaaca

SEQ ID NO: 757 - RNA, 120 nt, synthetic construct
  misc_feature 1..120: note = Synthetic sequence or unknown origin
  source 1..120: mol_type = other RNA
gttgtagttccctgatggtgaaaactgctcaggttactatgataaggtagtaaaccgaagagctctaatgccccgtctcgcacggggcattatctctaacagcgaaaaggcaaatttttt

SEQ ID NO: 758 - RNA, 43 nt, synthetic construct; identical to SEQ ID NO: 756
  misc_feature 1..43: note = Synthetic sequence or unknown origin
  source 1..43: mol_type = other RNA

SEQ ID NO: 759 - RNA, 19 nt, synthetic construct
  misc_feature 1..19: note = Synthetic sequence or unknown origin
  source 1..19: mol_type = other RNA
gcgaaaaggcaaatttttt

SEQ ID NO: 760 - RNA, 10 nt, synthetic construct
  misc_feature 1..10: note = Synthetic sequence or unknown origin
  source 1..10: mol_type = other RNA
gcgaaaaggc

SEQ ID NO: 761 - RNA, 13 nt, synthetic construct
  misc_feature 1..13: note = Synthetic sequence or unknown origin
  source 1..13: mol_type = other RNA
gcgaaaaggcaaa

SEQ ID NO: 762 - RNA, 113 nt, synthetic construct
  misc_feature 1..113: note = Synthetic sequence or unknown origin
  source 1..113: mol_type = other RNA
gttgtaattccctaatattgaaagatattaggttattacaataaggtccaacaggagtgttggtaccgtaaggctctgacggtacgtctattggcgtaccgtcatcctttttt

SEQ ID NO: 763 - RNA, 19 nt, synthetic construct
  misc_feature 1..19: note = Synthetic sequence or unknown origin
  source 1..19: mol_type = other RNA
gttgtaattccctaatatt

SEQ ID NO: 764 - RNA, 15 nt, synthetic construct
  misc_feature 1..15: note = Synthetic sequence or unknown origin
  source 1..15: mol_type = other RNA
gttgtaattccctaa

SEQ ID NO: 765 - RNA, 12 nt, synthetic construct
  misc_feature 1..12: note = Synthetic sequence or unknown origin
  source 1..12: mol_type = other RNA
gttgtaattccc

SEQ ID NO: 766 - RNA, 10 nt, synthetic construct
  misc_feature 1..10: note = Synthetic sequence or unknown origin
  source 1..10: mol_type = other RNA
gttgtaattc

SEQ ID NO: 767 - RNA, 19 nt, synthetic construct
  misc_feature 1..19: note = Synthetic sequence or unknown origin
  source 1..19: mol_type = other RNA
gatattaggttattacaat

SEQ ID NO: 768 - RNA, 15 nt, synthetic construct
  misc_feature 1..15: note = Synthetic sequence or unknown origin
  source 1..15: mol_type = other RNA
ttaggttattacaat

SEQ ID NO: 769 - RNA, 12 nt, synthetic construct
  misc_feature 1..12: note = Synthetic sequence or unknown origin
  source 1..12: mol_type = other RNA
ggttattacaat

SEQ ID NO: 770 - RNA, 10 nt, synthetic construct
  misc_feature 1..10: note = Synthetic sequence or unknown origin
  source 1..10: mol_type = other RNA
ttattacaat

SEQ ID NO: 771 - RNA, 27 nt, synthetic construct
  misc_feature 1..27: note = Synthetic sequence or unknown origin
  source 1..27: mol_type = other RNA
aaggtccaacaggagtgttggtaccgt

SEQ ID NO: 772 - RNA, 25 nt, synthetic construct
  misc_feature 1..25: note = Synthetic sequence or unknown origin
  source 1..25: mol_type = other RNA
aaggtccaacaggagtgttggtacc

SEQ ID NO: 773 - RNA, 44 nt, synthetic construct
  misc_feature 1..44: note = Synthetic sequence or unknown origin
  source 1..44: mol_type = other RNA
aaggctctgacggtacgtctattggcgtaccgtcatcctttttt

SEQ ID NO: 774 - RNA, 40 nt, synthetic construct
  misc_feature 1..40: note = Synthetic sequence or unknown origin
  source 1..40: mol_type = other RNA
aaggctctgacggtacgtctattggcgtaccgtcatcctt

SEQ ID NO: 775 - RNA, 38 nt, synthetic construct
  misc_feature 1..38: note = Synthetic sequence or unknown origin
  source 1..38: mol_type = other RNA
aaggctctgacggtacgtctattggcgtaccgtcatcc

SEQ ID NO: 776 - RNA, 100 nt, synthetic construct
  misc_feature 1..100: note = Synthetic sequence or unknown origin
  source 1..100: mol_type = other RNA
gttgtagctccctgttagtgaaaactaaataggttgctatgataaggtcataggaccgcaaagctctggcgctccgcttcggcggagcgccatctttttt

SEQ ID NO: 777 - RNA, 19 nt, synthetic construct
  misc_feature 1..19: note = Synthetic sequence or unknown origin
  source 1..19: mol_type = other RNA
gttgtagctccctgttagt

SEQ ID NO: 778 - RNA, 15 nt, synthetic construct
  misc_feature 1..15: note = Synthetic sequence or unknown origin
  source 1..15: mol_type = other RNA
gttgtagctccctgt

SEQ ID NO: 779 - RNA, 12 nt, synthetic construct
  misc_feature 1..12: note = Synthetic sequence or unknown origin
  source 1..12: mol_type = other RNA
gttgtagctccc

SEQ ID NO: 780 - RNA, 10 nt, synthetic construct
  misc_feature 1..10: note = Synthetic sequence or unknown origin
  source 1..10: mol_type = other RNA
gttgtagctc

SEQ ID NO: 781 - RNA, 20 nt, synthetic construct
  misc_feature 1..20: note = Synthetic sequence or unknown origin
  source 1..20: mol_type = other RNA
actaaataggttgctatgat

SEQ ID NO: 782 - RNA, 16 nt, synthetic construct
  misc_feature 1..16: note = Synthetic sequence or unknown origin
  source 1..16: mol_type = other RNA
aataggttgctatgat

SEQ ID NO: 783 - RNA, 12 nt, synthetic construct
  misc_feature 1..12: note = Synthetic sequence or unknown origin
  source 1..12: mol_type = other RNA
ggttgctatgat

SEQ ID NO: 784 - RNA, 10 nt, synthetic construct
  misc_feature 1..10: note = Synthetic sequence or unknown origin
  source 1..10: mol_type = other RNA
ttgctatgat

SEQ ID NO: 785 - RNA, 16 nt, synthetic construct
  misc_feature 1..16: note = Synthetic sequence or unknown origin
  source 1..16: mol_type = other RNA
aaggtcataggaccgc

SEQ ID NO: 786 - RNA, 14 nt, synthetic construct
  misc_feature 1..14: note = Synthetic sequence or unknown origin
  source 1..14: mol_type = other RNA
aaggtcataggacc

SEQ ID NO: 787 - RNA, 41 nt, synthetic construct
  misc_feature 1..41: note = Synthetic sequence or unknown origin
  source 1..41: mol_type = other RNA
aaagctctggcgctccgcttcggcggagcgccatctttttt

SEQ ID NO: 788 - RNA, 38 nt, synthetic construct
  misc_feature 1..38: note = Synthetic sequence or unknown origin
  source 1..38: mol_type = other RNA
aaagctctggcgctccgcttcggcggagcgccatcttt

SEQ ID NO: 789 - RNA, 35 nt, synthetic construct
  misc_feature 1..35: note = Synthetic sequence or unknown origin
  source 1..35: mol_type = other RNA
aaagctctggcgctccgcttcggcggagcgccatc

SEQ ID NO: 790 - RNA, 111 nt, synthetic construct
  misc_feature 1..111: note = Synthetic sequence or unknown origin
  source 1..111: mol_type = other RNA
gttgtagctccctgttagtgaaaactaaataggttgctatgataaggtcataggaccgcaaagctctggcgctccgcttcggcggagcgccatcttttttgctcatttttt

SEQ ID NO: 791 - RNA, 14 nt, synthetic construct
  misc_feature 1..14: note = Synthetic sequence or unknown origin
  source 1..14: mol_type = other RNA
aaggtcataggacc

SEQ ID NO: 792 - RNA, 54 nt, synthetic construct
  misc_feature 1..54: note = Synthetic sequence or unknown origin
  source 1..54: mol_type = other RNA
gcaaagctctggcgctccgcttcggcggagcgccatcttttttgctcatttttt

SEQ ID NO: 793 - RNA, 45 nt, synthetic construct
  misc_feature 1..45: note = Synthetic sequence or unknown origin
  source 1..45: mol_type = other RNA
gcaaagctctggcgctccgcttcggcggagcgccatcttttttgc

SEQ ID NO: 794 - RNA, 48 nt, synthetic construct
  misc_feature 1..48: note = Synthetic sequence or unknown origin
  source 1..48: mol_type = other RNA
gcaaagctctggcgctccgcttcggcggagcgccatcttttttgctca

SEQ ID NO: 795 - RNA, 111 nt, synthetic construct
  misc_feature 1..111: note = Synthetic sequence or unknown origin
  source 1..111: mol_type = other RNA
gttgtagctccctgttagtgaaaactaaataggttgctatgataaggtcataggaccgcaaagctctggcgctccgcttcggcggagcgccatcttctttgctcatttttt

SEQ ID NO: 796 - RNA, 54 nt, synthetic construct
  misc_feature 1..54: note = Synthetic sequence or unknown origin
  source 1..54: mol_type = other RNA
gcaaagctctggcgctccgcttcggcggagcgccatcttctttgctcatttttt

SEQ ID NO: 797 - RNA, 45 nt, synthetic construct
  misc_feature 1..45: note = Synthetic sequence or unknown origin
  source 1..45: mol_type = other RNA
gcaaagctctggcgctccgcttcggcggagcgccatcttctttgc

SEQ ID NO: 798 - RNA, 48 nt, synthetic construct
  misc_feature 1..48: note = Synthetic sequence or unknown origin
  source 1..48: mol_type = other RNA
gcaaagctctggcgctccgcttcggcggagcgccatcttctttgctca

SEQ ID NO: 799 - RNA, 123 nt, synthetic construct
  misc_feature 1..123: note = Synthetic sequence or unknown origin
  source 1..123: mol_type = other RNA
gttgtagctccctggtagtgaaaactatcaggttgctatgataaggttactacttatcgtagtataccgcagagctctgacgatcggttttaccgatcgtcatctttgtatctccactttttt

SEQ ID NO: 800 - RNA, 19 nt, synthetic construct
  misc_feature 1..19: note = Synthetic sequence or unknown origin
  source 1..19: mol_type = other RNA
gttgtagctccctggtagt

SEQ ID NO: 801 - RNA, 15 nt, synthetic construct
  misc_feature 1..15: note = Synthetic sequence or unknown origin
  source 1..15: mol_type = other RNA
gttgtagctccctgg

SEQ ID NO: 802 - RNA, 12 nt, synthetic construct
  misc_feature 1..12: note = Synthetic sequence or unknown origin
  source 1..12: mol_type = other RNA
gttgtagctccc

SEQ ID NO: 803 - RNA, 10 nt, synthetic construct
  misc_feature 1..10: note = Synthetic sequence or unknown origin
  source 1..10: mol_type = other RNA
gttgtagctc

SEQ ID NO: 804 - RNA, 19 nt, synthetic construct
  misc_feature 1..19: note = Synthetic sequence or unknown origin
  source 1..19: mol_type = other RNA
actatcaggttgctatgat

SEQ ID NO: 805 - RNA, 15 nt, synthetic construct
  misc_feature 1..15: note = Synthetic sequence or unknown origin
  source 1..15: mol_type = other RNA
tcaggttgctatgat

SEQ ID NO: 806 - RNA, 12 nt, synthetic construct
  misc_feature 1..12: note = Synthetic sequence or unknown origin
  source 1..12: mol_type = other RNA
ggttgctatgat

SEQ ID NO: 807 - RNA, 10 nt, synthetic construct
  misc_feature 1..10: note = Synthetic sequence or unknown origin
  source 1..10: mol_type = other RNA
ttgctatgat

SEQ ID NO: 808 - RNA, 26 nt, synthetic construct
  misc_feature 1..26: note = Synthetic sequence or unknown origin
  source 1..26: mol_type = other RNA
aaggttactacttatcgtagtatacc

SEQ ID NO: 809 - RNA, 26 nt, synthetic construct
  misc_feature 1..26: note = Synthetic sequence or unknown origin
  source 1..26: mol_type = other RNA
aaggttactacttatcgtagtatacc

SEQ ID NO: 810 - RNA, 55 nt, synthetic construct
  misc_feature 1..55: note = Synthetic sequence or unknown origin
  source 1..55: mol_type = other RNA
gcagagctctgacgatcggttttaccgatcgtcatctttgtatctccactttttt

SEQ ID NO: 811 - RNA, 41 nt, synthetic construct
  misc_feature 1..41: note = Synthetic sequence or unknown origin
  source 1..41: mol_type = other RNA
gcagagctctgacgatcggttttaccgatcgtcatctttgt

SEQ ID NO: 812 - RNA, 49 nt, synthetic construct
  misc_feature 1..49: note = Synthetic sequence or unknown origin
  source 1..49: mol_type = other RNA
gcagagctctgacgatcggttttaccgatcgtcatctttgtatctccac

SEQ ID NO: 813 - RNA, 123 nt, synthetic construct
  misc_feature 1..123: note = Synthetic sequence or unknown origin
  source 1..123: mol_type = other RNA
gttgtagctccctggtagtgaaaactatcaggttgctatgataaggttactacttatcgtagtataccgcagagctctgacgatcggttctaccgatcgtcatctttgtatctccactttttt

SEQ ID NO: 814 - RNA, 55 nt, synthetic construct
  misc_feature 1..55: note = Synthetic sequence or unknown origin
  source 1..55: mol_type = other RNA
gcagagctctgacgatcggttctaccgatcgtcatctttgtatctccactttttt

SEQ ID NO: 815 - RNA, 41 nt, synthetic construct
  misc_feature 1..41: note = Synthetic sequence or unknown origin
  source 1..41: mol_type = other RNA
gcagagctctgacgatcggttctaccgatcgtcatctttgt

SEQ ID NO: 816 - RNA, 49 nt, synthetic construct
  misc_feature 1..49: note = Synthetic sequence or unknown origin
  source 1..49: mol_type = other RNA
gcagagctctgacgatcggttctaccgatcgtcatctttgtatctccac

SEQ ID NO: 817 - RNA, 116 nt, synthetic construct
  misc_feature 1..116: note = Synthetic sequence or unknown origin
  source 1..116: mol_type = other RNA
gttgtagttccctgacggtgaaaactgttaggttactacgataaggttactaccttgtgtagtataccgcaaagctctagcgcctcgctttatgcggggcgctatctttatttttt

SEQ ID NO: 818 - RNA, 19 nt, synthetic construct
  misc_feature 1..19: note = Synthetic sequence or unknown origin
  source 1..19: mol_type = other RNA
gttgtagttccctgacggt

SEQ ID NO: 819 - RNA, 15 nt, synthetic construct
  misc_feature 1..15: note = Synthetic sequence or unknown origin
  source 1..15: mol_type = other RNA
gttgtagttccctga

SEQ ID NO: 820 - RNA, 12 nt, synthetic construct
  misc_feature 1..12: note = Synthetic sequence or unknown origin
  source 1..12: mol_type = other RNA
gttgtagttccc

SEQ ID NO: 821 - RNA, 10 nt, synthetic construct
  misc_feature 1..10: note = Synthetic sequence or unknown origin
  source 1..10: mol_type = other RNA
gttgtagttc

SEQ ID NO: 822 - RNA, 19 nt, synthetic construct
  misc_feature 1..19: note = Synthetic sequence or unknown origin
  source 1..19: mol_type = other RNA
actgttaggttactacgat

SEQ ID NO: 823 - RNA, 15 nt, synthetic construct
  misc_feature 1..15: note = Synthetic sequence or unknown origin
  source 1..15: mol_type = other RNA
ttaggttactacgat

SEQ ID NO: 824 - RNA, 12 nt, synthetic construct
  misc_feature 1..12: note = Synthetic sequence or unknown origin
  source 1..12: mol_type = other RNA
ggttactacgat

SEQ ID NO: 825 - RNA, 10 nt, synthetic construct
  misc_feature 1..10: note = Synthetic sequence or unknown origin
  source 1..10: mol_type = other RNA
ttactacgat

SEQ ID NO: 826 - RNA, 28 nt, synthetic construct
  misc_feature 1..28: note = Synthetic sequence or unknown origin
  source 1..28: mol_type = other RNA
aaggttactaccttgtgtagtataccgc

SEQ ID NO: 827 - RNA, 26 nt, synthetic construct
  misc_feature 1..26: note = Synthetic sequence or unknown origin
  source 1..26: mol_type = other RNA
aaggttactaccttgtgtagtatacc

SEQ ID NO: 828 - RNA, 46 nt, synthetic construct
  misc_feature 1..46: note = Synthetic sequence or unknown origin
  source 1..46: mol_type = other RNA
aaagctctagcgcctcgctttatgcggggcgctatctttatttttt

SEQ ID NO: 829 - RNA, 39 nt, synthetic construct
  misc_feature 1..39: note = Synthetic sequence or unknown origin
  source 1..39: mol_type = other RNA
aaagctctagcgcctcgctttatgcggggcgctatcttt

SEQ ID NO: 830 - RNA, 40 nt, synthetic construct
  misc_feature 1..40: note = Synthetic sequence or unknown origin
  source 1..40: mol_type = other RNA
aaagctctagcgcctcgctttatgcggggcgctatcttta

SEQ ID NO: 831 - RNA, 151 nt, synthetic construct
  misc_feature 1..151: note = Synthetic sequence or unknown origin
  source 1..151: mol_type = other RNA
gttgtagttccccggtagtgaaaactatcgggttactatgataaggtagtaaaccgaagagctctgacgcctcgcatttcgtggggcgttatctctttatggggcggtttgcataacgagagaattggttcaggagggatcaagatttttt

SEQ ID NO: 832 - RNA, 19 nt, synthetic construct
  misc_feature 1..19: note = Synthetic sequence or unknown origin
  source 1..19: mol_type = other RNA
gttgtagttccccggtagt

SEQ ID NO: 833 - RNA, 15 nt, synthetic construct
  misc_feature 1..15: note = Synthetic sequence or unknown origin
  source 1..15: mol_type = other RNA
gttgtagttccccgg

SEQ ID NO: 834 - RNA, 12 nt, synthetic construct
  misc_feature 1..12: note = Synthetic sequence or unknown origin
  source 1..12: mol_type = other RNA
gttgtagttccc

SEQ ID NO: 835 - RNA, 10 nt, synthetic construct
  misc_feature 1..10: note = Synthetic sequence or unknown origin
  source 1..10: mol_type = other RNA
gttgtagttc

SEQ ID NO: 836 - RNA, 19 nt, synthetic construct
  misc_feature 1..19: note = Synthetic sequence or unknown origin
  source 1..19: mol_type = other RNA
actatcgggttactatgat

SEQ ID NO: 837 - RNA, 15 nt, synthetic construct
  misc_feature 1..15: note = Synthetic sequence or unknown origin
  source 1..15: mol_type = other RNA
tcgggttactatgat

SEQ ID NO: 838 - RNA, 12 nt, synthetic construct
  misc_feature 1..12: note = Synthetic sequence or unknown origin
  source 1..12: mol_type = other RNA
ggttactatgat

SEQ ID NO: 839 - RNA, 10 nt, synthetic construct
  misc_feature 1..10: note = Synthetic sequence or unknown origin
  source 1..10: mol_type = other RNA
ttactatgat

SEQ ID NO: 840 - RNA, 75 nt, synthetic construct
  misc_feature 1..75: note = Synthetic sequence or unknown origin
  source 1..75: mol_type = other RNA
aaggtagtaaaccgaagagctctgacgcctcgcatttcgtggggcgttatctctttatggggcggtttgcataac

SEQ ID NO: 841 - RNA, 70 nt, synthetic construct
  misc_feature 1..70: note = Synthetic sequence or unknown origin
  source 1..70: mol_type = other RNA
aaggtagtaaaccgaagagctctgacgcctcgcatttcgtggggcgttatctctttatggggcggtttgc

SEQ ID NO: 842 - RNA, 34 nt, synthetic construct
  misc_feature 1..34: note = Synthetic sequence or unknown origin
  source 1..34: mol_type = other RNA
gagagaattggttcaggagggatcaagatttttt

SEQ ID NO: 843 - RNA, 34 nt, synthetic construct; identical to SEQ ID NO: 842
  misc_feature 1..34: note = Synthetic sequence or unknown origin
  source 1..34: mol_type = other RNA

SEQ ID NO: 844 - RNA, 28 nt, synthetic construct
  misc_feature 1..28: note = Synthetic sequence or unknown origin
  source 1..28: mol_type = other RNA
gagagaattggttcaggagggatcaaga

SEQ ID NO: 845 - RNA, 117 nt, synthetic construct
  misc_feature 1..117: note = Synthetic sequence or unknown origin
  source 1..117: mol_type = other RNA
gttgtagctccctaacagtgaaaactattaggttgctatgataaggttactgctttattgtagtataccgcaaagctctgacgatcgattttatcggtcgtcatcttcatatttttt

SEQ ID NO: 846 - RNA, 19 nt, synthetic construct
  misc_feature 1..19: note = Synthetic sequence or unknown origin
  source 1..19: mol_type = other RNA
gttgtagctccctaacagt

SEQ ID NO: 847 - RNA, 15 nt, synthetic construct
  misc_feature 1..15: note = Synthetic sequence or unknown origin
  source 1..15: mol_type = other RNA
gttgtagctccctaa

SEQ ID NO: 848 - RNA, 12 nt, synthetic construct
  misc_feature 1..12: note = Synthetic sequence or unknown origin
  source 1..12: mol_type = other RNA
gttgtagctccc

SEQ ID NO: 849 - RNA, 10 nt, synthetic construct
  misc_feature 1..10: note = Synthetic sequence or unknown origin
  source 1..10: mol_type = other RNA
gttgtagctc

SEQ ID NO: 850 - RNA, 19 nt, synthetic construct
  misc_feature 1..19: note = Synthetic sequence or unknown origin
  source 1..19: mol_type = other RNA
actattaggttgctatgat

SEQ ID NO: 851 - RNA, 19 nt, synthetic construct
  misc_feature 1..19: note = Synthetic sequence or unknown origin
  source 1..19: mol_type = other RNA
actattaggttgctatgat

SEQ ID NO: 852 - RNA, 12 nt, synthetic construct
  misc_feature 1..12: note = Synthetic sequence or unknown origin
  source 1..12: mol_type = other RNA
ggttgctatgat

SEQ ID NO: 853 - RNA, 10 nt, synthetic construct
  misc_feature 1..10: note = Synthetic sequence or unknown origin
  source 1..10: mol_type = other RNA
ttgctatgat

SEQ ID NO: 854 - RNA, 36 nt, synthetic construct
  misc_feature 1..36: note = Synthetic sequence or unknown origin
  source 1..36: mol_type = other RNA
aaggttactgctttattgtagtataccgcaaagctc

SEQ ID NO: 855 - RNA, 27 nt, synthetic construct
  misc_feature 1..27: note = Synthetic sequence or unknown origin
  source 1..27: mol_type = other RNA
aaggttactgctttattgtagtatacc

SEQ ID NO: 856 - RNA, 39 nt, synthetic construct
  misc_feature 1..39: note = Synthetic sequence or unknown origin
  source 1..39: mol_type = other RNA
tgacgatcgattttatcggtcgtcatcttcatatttttt

SEQ ID NO: 857 - RNA, 25 nt, synthetic construct
  misc_feature 1..25: note = Synthetic sequence or unknown origin
  source 1..25: mol_type = other RNA
tgacgatcgattttatcggtcgtca

SEQ ID NO: 858 - RNA, 33 nt, synthetic construct
  misc_feature 1..33: note = Synthetic sequence or unknown origin
  source 1..33: mol_type = other RNA
tgacgatcgattttatcggtcgtcatcttcata

SEQ ID NO: 859 - RNA, 117 nt, synthetic construct
  misc_feature 1..117: note = Synthetic sequence or unknown origin
  source 1..117: mol_type = other RNA
gttgtagctccctaacagtgaaaactattaggttgctatgataaggttactgctttattgtagtataccgcaaagctctgacgatcgattctatcggtcgtcatcttcatatttttt

SEQ ID NO: 860 - RNA, 39 nt, synthetic construct
  misc_feature 1..39: note = Synthetic sequence or unknown origin
  source 1..39: mol_type = other RNA
tgacgatcgattctatcggtcgtcatcttcatatttttt

SEQ ID NO: 861 - RNA, 25 nt, synthetic construct
  misc_feature 1..25: note = Synthetic sequence or unknown origin
  source 1..25: mol_type = other RNA
tgacgatcgattctatcggtcgtca

SEQ ID NO: 862 - RNA, 33 nt, synthetic construct
  misc_feature 1..33: note = Synthetic sequence or unknown origin
  source 1..33: mol_type = other RNA
tgacgatcgattctatcggtcgtcatcttcata

SEQ ID NO: 863 - RNA, 110 nt, synthetic construct
  misc_feature 1..110: note = Synthetic sequence or unknown origin
  source 1..110: mol_type = other RNA
gttttagctctctgatgagaaatcatcagagttctaagacaaggcagaatgccgtagggtagtggaaacccaaaacaccacactgagcaatctaacgattgctctttttt

SEQ ID NO: 864 - RNA, 18 nt, synthetic construct
  misc_feature 1..18: note = Synthetic sequence or unknown origin
  source 1..18: mol_type = other RNA
gttttagctctctgatga

SEQ ID NO: 865 - RNA, 15 nt, synthetic construct
  misc_feature 1..15: note = Synthetic sequence or unknown origin
  source 1..15: mol_type = other RNA
gttttagctctctga

SEQ ID NO: 866 - RNA, 12 nt, synthetic construct
  misc_feature 1..12: note = Synthetic sequence or unknown origin
  source 1..12: mol_type = other RNA
gttttagctctc

SEQ ID NO: 867 - RNA, 10 nt, synthetic construct
  misc_feature 1..10: note = Synthetic sequence or unknown origin
  source 1..10: mol_type = other RNA
gttttagctc

SEQ ID NO: 868 - RNA, 18 nt, synthetic construct
  misc_feature 1..18: note = Synthetic sequence or unknown origin
  source 1..18: mol_type = other RNA
tcatcagagttctaagac

SEQ ID NO: 869 - RNA, 15 nt, synthetic construct
  misc_feature 1..15: note = Synthetic sequence or unknown origin
  source 1..15: mol_type = other RNA
tcagagttctaagac

SEQ ID NO: 870 - RNA, 12 nt, synthetic construct
  misc_feature 1..12: note = Synthetic sequence or unknown origin
  source 1..12: mol_type = other RNA
gagttctaagac

SEQ ID NO: 871 - RNA, 10 nt, synthetic construct
  misc_feature 1..10: note = Synthetic sequence or unknown origin
  source 1..10: mol_type = other RNA
gttctaagac

SEQ ID NO: 872 - RNA, 13 nt, synthetic construct
  misc_feature 1..13: note = Synthetic sequence or unknown origin
  source 1..13: mol_type = other RNA
aaggcagaatgcc

SEQ ID NO: 873 - RNA, 13 nt, synthetic construct
  misc_feature 1..13: note = Synthetic sequence or unknown origin
  source 1..13: mol_type = other RNA
aaggcagaatgcc

SEQ ID NO: 874 - RNA, 31 nt, synthetic construct
  misc_feature 1..31: note = Synthetic sequence or unknown origin
  source 1..31: mol_type = other RNA
gtagggtagtggaaacccaaaacaccacact

SEQ ID NO: 875 - RNA, 28 nt, synthetic construct
  misc_feature 1..28: note = Synthetic sequence or unknown origin
  source 1..28: mol_type = other RNA
gtagggtagtggaaacccaaaacaccac

SEQ ID NO: 876 - RNA, 26 nt, synthetic construct
  misc_feature 1..26: note = Synthetic sequence or unknown origin
  source 1..26: mol_type = other RNA
gagcaatctaacgattgctctttttt

SEQ ID NO: 877 - RNA, 20 nt, synthetic construct
  misc_feature 1..20: note = Synthetic sequence or unknown origin
  source 1..20: mol_type = other RNA
gagcaatctaacgattgctc

SEQ ID NO: 878 - RNA, 20 nt, synthetic construct
  misc_feature 1..20: note = Synthetic sequence or unknown origin
  source 1..20: mol_type = other RNA
gagcaatctaacgattgctc

SEQ ID NO: 879 - RNA, 110 nt, synthetic construct
  misc_feature 1..110: note = Synthetic sequence or unknown origin
  source 1..110: mol_type = other RNA
gtcttagctctctgatgagaaatcatcagagttctaagacaaggcagaatgccgtagggtagtggaaacccaaaacaccacactgagcaatctaacgattgctctttttt

SEQ ID NO: 880 - RNA, 18 nt, synthetic construct
  misc_feature 1..18: note = Synthetic sequence or unknown origin
  source 1..18: mol_type = other RNA
gtcttagctctctgatga

SEQ ID NO: 881 - RNA, 15 nt, synthetic construct
  misc_feature 1..15: note = Synthetic sequence or unknown origin
  source 1..15: mol_type = other RNA
gtcttagctctctga

SEQ ID NO: 882 - RNA, 12 nt, synthetic construct
  misc_feature 1..12: note = Synthetic sequence or unknown origin
  source 1..12: mol_type = other RNA
gtcttagctctc

SEQ ID NO: 883 - RNA, 10 nt, synthetic construct
  misc_feature 1..10: note = Synthetic sequence or unknown origin
  source 1..10: mol_type = other RNA
gtcttagctc

SEQ ID NO: 884 - RNA, 101 nt, synthetic construct
  misc_feature 1..101: note = Synthetic sequence or unknown origin
  source 1..101: mol_type = other RNA
attgtagttccctaattttgaaaacaattaggttactacaacaaggtagaaaaccgaaaagctctgacggttcacttttttggtgggccgtcatctttttt

SEQ ID NO: 885 - RNA, 19 nt, synthetic construct
  misc_feature 1..19: note = Synthetic sequence or unknown origin
  source 1..19: mol_type = other RNA
attgtagttccctaatttt

SEQ ID NO: 886 - RNA, 15 nt, synthetic construct
  misc_feature 1..15: note = Synthetic sequence or unknown origin
  source 1..15: mol_type = other RNA
attgtagttccctaa

SEQ ID NO: 887 - RNA, 12 nt, synthetic construct
  misc_feature 1..12: note = Synthetic sequence or unknown origin
  source 1..12: mol_type = other RNA
attgtagttccc

SEQ ID NO: 888 - RNA, 10 nt, synthetic construct
  misc_feature 1..10: note = Synthetic sequence or unknown origin
  source 1..10: mol_type = other RNA
attgtagttc

SEQ ID NO: 889 - RNA, 18 nt, synthetic construct
  misc_feature 1..18: note = Synthetic sequence or unknown origin
  source 1..18: mol_type = other RNA
acaattaggttactacaa

SEQ ID NO: 890 - RNA, 14 nt, synthetic construct
  misc_feature 1..14: note = Synthetic sequence or unknown origin
  source 1..14: mol_type = other RNA
ttaggttactacaa

SEQ ID NO: 891 - RNA, 11 nt, synthetic construct
  misc_feature 1..11: note = Synthetic sequence or unknown origin
  source 1..11: mol_type = other RNA
ggttactacaa

SEQ ID NO: 892 - RNA, 14 nt, synthetic construct
  misc_feature 1..14: note = Synthetic sequence or unknown origin
  source 1..14: mol_type = other RNA
caaggtagaaaacc

SEQ ID NO: 893 - RNA, 14 nt, synthetic construct
  misc_feature 1..14: note = Synthetic sequence or unknown origin
  source 1..14: mol_type = other RNA
caaggtagaaaacc

SEQ ID NO: 894 - RNA, 46 nt, synthetic construct
  misc_feature 1..46: note = Synthetic sequence or unknown origin
  source 1..46: mol_type = other RNA
gaaaagctctgacggttcacttttttggtgggccgtcatctttttt

SEQ ID NO: 895 - RNA, 45 nt, synthetic construct
  misc_feature 1..45: note = Synthetic sequence or unknown origin
  source 1..45: mol_type = other RNA
gaaaagctctgacggttcacttttttggtgggccgtcatcttttt

SEQ ID NO: 896 - RNA, 40 nt, synthetic construct
  misc_feature 1..40: note = Synthetic sequence or unknown origin
  source 1..40: mol_type = other RNA
gaaaagctctgacggttcacttttttggtgggccgtcatc

SEQ ID NO: 897 - RNA, 101 nt, synthetic construct
  misc_feature 1..101: note = Synthetic sequence or unknown origin
  source 1..101: mol_type = other RNA
attgtagttccctaatttcgaaaacaattaggttactacaacaaggtagaaaaccgaaaagctctgacggttcactttcttggtgggccgtcatctttttt

SEQ ID NO: 898 - RNA, 19 nt, synthetic construct
  misc_feature 1..19: note = Synthetic sequence or unknown origin
  source 1..19: mol_type = other RNA
attgtagttccctaatttc

SEQ ID NO: 899 - RNA, 46 nt, synthetic construct
  misc_feature 1..46: note = Synthetic sequence or unknown origin
  source 1..46: mol_type = other RNA
gaaaagctctgacggttcactttcttggtgggccgtcatctttttt

SEQ ID NO: 900 - RNA, 45 nt, synthetic construct
  misc_feature 1..45: note = Synthetic sequence or unknown origin
  source 1..45: mol_type = other RNA
gaaaagctctgacggttcactttcttggtgggccgtcatcttttt

SEQ ID NO: 901 - RNA, 40 nt, synthetic construct
  misc_feature 1..40: note = Synthetic sequence or unknown origin
  source 1..40: mol_type = other RNA
gaaaagctctgacggttcactttcttggtgggccgtcatc

SEQ ID NO: 902 - RNA, 101 nt, synthetic construct
  misc_feature 1..101: note = Synthetic sequence or unknown origin
  source 1..101: mol_type = other RNA
gtttgagagtcttgttagaaataaacaagacgagttcaaataaaaatttattctaaccacttgttcgcattggcgacgcgctctcttcggagagctttttt

SEQ ID NO: 903 - RNA, 17 nt, synthetic construct
  misc_feature 1..17: note = Synthetic sequence or unknown origin
  source 1..17: mol_type = other RNA
gtttgagagtcttgtta

SEQ ID NO: 904 - RNA, 15 nt, synthetic construct
  misc_feature 1..15: note = Synthetic sequence or unknown origin
  source 1..15: mol_type = other RNA
gtttgagagtcttgt

SEQ ID NO: 905 - RNA, 12 nt, synthetic construct
  misc_feature 1..12: note = Synthetic sequence or unknown origin
  source 1..12: mol_type = other RNA
gtttgagagtct

SEQ ID NO: 906 - RNA, 10 nt, synthetic construct
  misc_feature 1..10: note = Synthetic sequence or unknown origin
  source 1..10: mol_type = other RNA
gtttgagagt

SEQ ID NO: 907 - RNA, 20 nt, synthetic construct
  misc_feature 1..20: note = Synthetic sequence or unknown origin
  source 1..20: mol_type = other RNA
taaacaagacgagttcaaat

SEQ ID NO: 908 - RNA, 17 nt, synthetic construct
  misc_feature 1..17: note = Synthetic sequence or unknown origin
  source 1..17: mol_type = other RNA
acaagacgagttcaaat

SEQ ID NO: 909 - RNA, 14 nt, synthetic construct
  misc_feature 1..14: note = Synthetic sequence or unknown origin
  source 1..14: mol_type = other RNA
agacgagttcaaat

SEQ ID NO: 910 - RNA, 12 nt, synthetic construct
  misc_feature 1..12: note = Synthetic sequence or unknown origin
  source 1..12: mol_type = other RNA
acgagttcaaat

SEQ ID NO: 911 - RNA, 38 nt, synthetic construct
  misc_feature 1..38: note = Synthetic sequence or unknown origin
  source 1..38: mol_type = other RNA
aaaaatttattctaaccacttgttcgcattggcgacgc

SEQ ID NO: 912 - RNA, 38 nt, synthetic construct; identical to SEQ ID NO: 911
  misc_feature 1..38: note = Synthetic sequence or unknown origin
  source 1..38: mol_type = other RNA

SEQ ID NO: 913 - RNA, 22 nt, synthetic construct
  misc_feature 1..22: note = Synthetic sequence or unknown origin
  source 1..22: mol_type = other RNA
gctctcttcggagagctttttt

SEQ ID NO: 914 - RNA, 16 nt, synthetic construct
  misc_feature 1..16: note = Synthetic sequence or unknown origin
  source 1..16: mol_type = other RNA
gctctcttcggagagc

SEQ ID NO: 915 - RNA, 16 nt, synthetic construct
  misc_feature 1..16: note = Synthetic sequence or unknown origin
  source 1..16: mol_type = other RNA
gctctcttcggagagc

SEQ ID NO: 916 - RNA, 99 nt, synthetic construct
  misc_feature 1..99: note = Synthetic sequence or unknown origin
  source 1..99: mol_type = other RNA
gttgtagttccctaattttgaaaattattaggttactatgataaggtagtacaccgaaaagctctaacgctctgtcttggacagagcgttatctttttt

SEQ ID NO: 917 - RNA, 19 nt, synthetic construct
  misc_feature 1..19: note = Synthetic sequence or unknown origin
  source 1..19: mol_type = other RNA
gttgtagttccctaatttt

SEQ ID NO: 918 - RNA, 15 nt, synthetic construct
  misc_feature 1..15: note = Synthetic sequence or unknown origin
  source 1..15: mol_type = other RNA
gttgtagttccctaa

SEQ ID NO: 919 - RNA, 12 nt, synthetic construct
  misc_feature 1..12: note = Synthetic sequence or unknown origin
  source 1..12: mol_type = other RNA
gttgtagttccc

SEQ ID NO: 920 - RNA, 10 nt, synthetic construct
  misc_feature 1..10: note = Synthetic sequence or unknown origin
  source 1..10: mol_type = other RNA
gttgtagttc

SEQ ID NO: 921 - RNA, 19 nt, synthetic construct
  misc_feature 1..19: note = Synthetic sequence or unknown origin
  source 1..19: mol_type = other RNA
attattaggttactatgat

SEQ ID NO: 922 - RNA, 15 nt, synthetic construct
  misc_feature 1..15: note = Synthetic sequence or unknown origin
  source 1..15: mol_type = other RNA
ttaggttactatgat

SEQ ID NO: 923 - RNA, 12 nt, synthetic construct
  misc_feature 1..12: note = Synthetic sequence or unknown origin
  source 1..12: mol_type = other RNA
ggttactatgat

SEQ ID NO: 924 - RNA, 10 nt, synthetic construct
  misc_feature 1..10: note = Synthetic sequence or unknown origin
  source 1..10: mol_type = other RNA
ttactatgat

SEQ ID NO: 925 - RNA, 13 nt, synthetic construct
  misc_feature 1..13: note = Synthetic sequence or unknown origin
  source 1..13: mol_type = other RNA
aaggtagtacacc

SEQ ID NO: 926 - RNA, 13 nt, synthetic construct
  misc_feature 1..13: note = Synthetic sequence or unknown origin
  source 1..13: mol_type = other RNA
aaggtagtacacc

SEQ ID NO: 927 - RNA, 44 nt, synthetic construct
  misc_feature 1..44: note = Synthetic sequence or unknown origin
  source 1..44: mol_type = other RNA
gaaaagctctaacgctctgtcttggacagagcgttatctttttt

SEQ ID NO: 928 - RNA, 43 nt, synthetic construct
  misc_feature 1..43: note = Synthetic sequence or unknown origin
  source 1..43: mol_type = other RNA
gaaaagctctaacgctctgtcttggacagagcgttatcttttt

SEQ ID NO: 929 - RNA, 38 nt, synthetic construct
  misc_feature 1..38: note = Synthetic sequence or unknown origin
  source 1..38: mol_type = other RNA
gaaaagctctaacgctctgtcttggacagagcgttatc

SEQ ID NO: 930 - RNA, 99 nt, synthetic construct
  misc_feature 1..99: note = Synthetic sequence or unknown origin
  source 1..99: mol_type = other RNA
gttgtagttccctaattctgaaaattattaggttactatgataaggtagtacaccgaaaagctctaacgctctgtcttggacagagcgttatctttttt

SEQ ID NO: 931 - RNA, 19 nt, synthetic construct
  misc_feature 1..19: note = Synthetic sequence or unknown origin
  source 1..19: mol_type = other RNA
gttgtagttccctaattct

SEQ ID NO: 932 - RNA, 134 nt, synthetic construct
  misc_feature 1..134: note = Synthetic sequence or unknown origin
  source 1..134: mol_type = other RNA
gttgtggttccctgttcttgaaagagaacatgtgttaccgcaataaggtaaaacaccacaaagcactgccccagcctaacggctggggcatctttgtagataaatattaggcaaaggagctgacatcatttttt

SEQ ID NO: 933 - RNA, 19 nt, synthetic construct
  misc_feature 1..19: note = Synthetic sequence or unknown origin
  source 1..19: mol_type = other RNA
gttgtggttccctgttctt

SEQ ID NO: 934 - RNA, 15 nt, synthetic construct
  misc_feature 1..15: note = Synthetic sequence or unknown origin
  source 1..15: mol_type = other RNA
gttgtggttccctgt

SEQ ID NO: 935 - RNA, 12 nt, synthetic construct
  misc_feature 1..12: note = Synthetic sequence or unknown origin
  source 1..12: mol_type = other RNA
gttgtggttccc

SEQ ID NO: 936 - RNA, 10 nt, synthetic construct
  misc_feature 1..10: note = Synthetic sequence or unknown origin
  source 1..10: mol_type = other RNA
gttgtggttc

SEQ ID NO: 937 - RNA, 21 nt, synthetic construct
  misc_feature 1..21: note = Synthetic sequence or unknown origin
  source 1..21: mol_type = other RNA
gagaacatgtgttaccgcaat

SEQ ID NO: 938 - RNA, 17 nt, synthetic construct
  misc_feature 1..17: note = Synthetic sequence or unknown origin
  source 1..17: mol_type = other RNA
acatgtgttaccgcaat

SEQ ID NO: 939 - RNA, 14 nt, synthetic construct
  misc_feature 1..14: note = Synthetic sequence or unknown origin
  source 1..14: mol_type = other RNA
tgtgttaccgcaat

SEQ ID NO: 940 - RNA, 10 nt, synthetic construct
  misc_feature 1..10: note = Synthetic sequence or unknown origin
  source 1..10: mol_type = other RNA
ttaccgcaat

SEQ ID NO: 941 - RNA, 13 nt, synthetic construct
  misc_feature 1..13: note = Synthetic sequence or unknown origin
  source 1..13: mol_type = other RNA
aaggtaaaacacc

SEQ ID NO: 942 - RNA, 13 nt, synthetic construct
  misc_feature 1..13: note = Synthetic sequence or unknown origin
  source 1..13: mol_type = other RNA
aaggtaaaacacc

SEQ ID NO: 943 - RNA, 52 nt, synthetic construct
  misc_feature 1..52: note = Synthetic sequence or unknown origin
  source 1..52: mol_type = other RNA
acaaagcactgccccagcctaacggctggggcatctttgtagataaatatta

SEQ ID NO: 944 - RNA, 40 nt, synthetic construct
  misc_feature 1..40: note = Synthetic sequence or unknown origin
  source 1..40: mol_type = other RNA
acaaagcactgccccagcctaacggctggggcatctttgt

SEQ ID NO: 945 - RNA, 25 nt, synthetic construct
  misc_feature 1..25: note = Synthetic sequence or unknown origin
  source 1..25: mol_type = other RNA
ggcaaaggagctgacatcatttttt

SEQ ID NO: 946 - RNA, 12 nt, synthetic construct
  misc_feature 1..12: note = Synthetic sequence or unknown origin
  source 1..12: mol_type = other RNA
ggcaaaggagct

SEQ ID NO: 947 - RNA, 19 nt, synthetic construct
  misc_feature 1..19: note = Synthetic sequence or unknown origin
  source 1..19: mol_type = other RNA
ggcaaaggagctgacatca

SEQ ID NO: 948 - RNA, 110 nt, synthetic construct
  misc_feature 1..110: note = Synthetic sequence or unknown origin
  source 1..110: mol_type = other RNA
attttagtacccggagaaagaaatttcttcggacctattaaaacaaggctttatgccgaaagtttactttgaagaaattaacaaaaaaggcaccgacgggtgcctttttt

SEQ ID NO: 949 - RNA, 19 nt, synthetic construct
  misc_feature 1..19: note = Synthetic sequence or unknown origin
  source 1..19: mol_type = other RNA
attttagtacccggagaaa

SEQ ID NO: 950 - RNA, 15 nt, synthetic construct
  misc_feature 1..15: note = Synthetic sequence or unknown origin
  source 1..15: mol_type = other RNA
attttagtacccgga

SEQ ID NO: 951 - RNA, 12 nt, synthetic construct
  misc_feature 1..12: note = Synthetic sequence or unknown origin
  source 1..12: mol_type = other RNA
attttagtaccc

SEQ ID NO: 952 - RNA, 10 nt, synthetic construct
  misc_feature 1..10: note = Synthetic sequence or unknown origin
  source 1..10: mol_type = other RNA
attttagtac

SEQ ID NO: 953 - RNA, 20 nt, synthetic construct
  misc_feature 1..20: note = Synthetic sequence or unknown origin
  source 1..20: mol_type = other RNA
tttcttcggacctattaaaa

SEQ ID NO: 954 - RNA, 16 nt, synthetic construct
  misc_feature 1..16: note = Synthetic sequence or unknown origin
  source 1..16: mol_type = other RNA
ttcggacctattaaaa

SEQ ID NO: 955 - RNA, 13 nt, synthetic construct
  misc_feature 1..13: note = Synthetic sequence or unknown origin
  source 1..13: mol_type = other RNA
ggacctattaaaa

SEQ ID NO: 956 - RNA, 11 nt, synthetic construct
  misc_feature 1..11: note = Synthetic sequence or unknown origin
  source 1..11: mol_type = other RNA
acctattaaaa

SEQ ID NO: 957 - RNA, 15 nt, synthetic construct
  misc_feature 1..15: note = Synthetic sequence or unknown origin
  source 1..15: mol_type = other RNA
caaggctttatgccg

SEQ ID NO: 958 - RNA, 14 nt, synthetic construct
  misc_feature 1..14: note = Synthetic sequence or unknown origin
  source 1..14: mol_type = other RNA
caaggctttatgcc

SEQ ID NO: 959 - RNA, 24 nt, synthetic construct
  misc_feature 1..24: note = Synthetic sequence or unknown origin
  source 1..24: mol_type = other RNA
aaagtttactttgaagaaattaac

SEQ ID NO: 960 - RNA, 12 nt, synthetic construct
  misc_feature 1..12: note = Synthetic sequence or unknown origin
  source 1..12: mol_type = other RNA
aaagtttacttt

SEQ ID NO: 961 - RNA, 28 nt, synthetic construct
  misc_feature 1..28: note = Synthetic sequence or unknown origin
  source 1..28: mol_type = other RNA
aaaaaaggcaccgacgggtgcctttttt

SEQ ID NO: 962 - RNA, 22 nt, synthetic construct
  misc_feature 1..22: note = Synthetic sequence or unknown origin
  source 1..22: mol_type = other RNA
aaaaaaggcaccgacgggtgcc

SEQ ID NO: 963 - RNA, 90 nt, synthetic construct
  misc_feature 1..90: note = Synthetic sequence or unknown origin
  source 1..90: mol_type = other RNA
gttttagtacctggaaaaagaaattttttcagatctactaaaataaggctttatgccgaaactaaaggacaccgacgggtgtcctttttt

SEQ ID NO: 964 - RNA, 19 nt, synthetic construct
  misc_feature 1..19: note = Synthetic sequence or unknown origin
  source 1..19: mol_type = other RNA
gttttagtacctggaaaaa

SEQ ID NO: 965 - RNA, 15 nt, synthetic construct
  misc_feature 1..15: note = Synthetic sequence or unknown origin
  source 1..15: mol_type = other RNA
gttttagtacctgga

SEQ ID NO: 966 - RNA, 12 nt, synthetic construct
  misc_feature 1..12: note = Synthetic sequence or unknown origin
  source 1..12: mol_type = other RNA
gttttagtacct

SEQ ID NO: 967 - RNA, 10 nt, synthetic construct
  misc_feature 1..10: note = Synthetic sequence or unknown origin
  source 1..10: mol_type = other RNA
gttttagtac

SEQ ID NO: 968 - RNA, 21 nt, synthetic construct
  misc_feature 1..21: note = Synthetic sequence or unknown origin
  source 1..21: mol_type = other RNA
ttttttcagatctactaaaat

SEQ ID NO: 969 - RNA, 17 nt, synthetic construct
  misc_feature 1..17: note = Synthetic sequence or unknown origin
  source 1..17: mol_type = other RNA
ttcagatctactaaaat

SEQ ID NO: 970 - RNA, 14 nt, synthetic construct
  misc_feature 1..14: note = Synthetic sequence or unknown origin
  source 1..14: mol_type = other RNA
agatctactaaaat

SEQ ID NO: 971 - RNA, 12 nt, synthetic construct
  misc_feature 1..12: note = Synthetic sequence or unknown origin
  source 1..12: mol_type = other RNA
atctactaaaat

SEQ ID NO: 972 - RNA, 19 nt, synthetic construct
  misc_feature 1..19: note = Synthetic sequence or unknown origin
  source 1..19: mol_type = other RNA
aaggctttatgccgaaact

SEQ ID NO: 973 - RNA, 13 nt, synthetic construct
  misc_feature 1..13: note = Synthetic sequence or unknown origin
  source 1..13: mol_type = other RNA
aaggctttatgcc

SEQ ID NO: 974 - RNA, 27 nt, synthetic construct
  misc_feature 1..27: note = Synthetic sequence or unknown origin
  source 1..27: mol_type = other RNA
aaaggacaccgacgggtgtcctttttt

SEQ ID NO: 975 - RNA, 24 nt, synthetic construct
  misc_feature 1..24: note = Synthetic sequence or unknown origin
  source 1..24: mol_type = other RNA
aaaggacaccgacgggtgtccttt

SEQ ID NO: 976 - RNA, 21 nt, synthetic construct
  misc_feature 1..21: note = Synthetic sequence or unknown origin
  source 1..21: mol_type = other RNA
aaaggacaccgacgggtgtcc

SEQ ID NO: 977 - RNA, 90 nt, synthetic construct
  misc_feature 1..90: note = Synthetic sequence or unknown origin
  source 1..90: mol_type = other RNA
gttctagtacctggaagaagaaattctttcagatctactagaataaggctttatgccgaaactaaaggacaccgacgggtgtcctttttt

SEQ ID NO: 978 - RNA, 19 nt, synthetic construct
  misc_feature 1..19: note = Synthetic sequence or unknown origin
  source 1..19: mol_type = other RNA
gttctagtacctggaagaa

SEQ ID NO: 979 - RNA, 15 nt, synthetic construct
  misc_feature 1..15: note = Synthetic sequence or unknown origin
  source 1..15: mol_type = other RNA
gttctagtacctgga

SEQ ID NO: 980 - RNA, 12 nt, synthetic construct
  misc_feature 1..12: note = Synthetic sequence or unknown origin
  source 1..12: mol_type = other RNA
gttctagtacct

SEQ ID NO: 981 - RNA, 10 nt, synthetic construct
  misc_feature 1..10: note = Synthetic sequence or unknown origin
  source 1..10: mol_type = other RNA
gttctagtac

SEQ ID NO: 982 - RNA, 21 nt, synthetic construct
  misc_feature 1..21: note = Synthetic sequence or unknown origin
  source 1..21: mol_type = other RNA
ttctttcagatctactagaat

SEQ ID NO: 983 - RNA, 17 nt, synthetic construct
  misc_feature 1..17: note = Synthetic sequence or unknown origin
  source 1..17: mol_type = other RNA
ttcagatctactagaat

SEQ ID NO: 984 - RNA, 14 nt, synthetic construct
  misc_feature 1..14: note = Synthetic sequence or unknown origin
  source 1..14: mol_type = other RNA
agatctactagaat

SEQ ID NO: 985 - RNA, 12 nt, synthetic construct
  misc_feature 1..12: note = Synthetic sequence or unknown origin
  source 1..12: mol_type = other RNA
atctactagaat

SEQ ID NO: 986 - RNA, 135 nt, synthetic construct
  misc_feature 1..135: note = Synthetic sequence or unknown origin
  source 1..135: mol_type = other RNA
gttttgccttgaatccgaaaggattcaagacaaaatttgagatgcaaaccgattttcctgactgcaagccagtcacaccggtaacaagagcattttttaagactgtctcactgtagaagtgaggcagtctttttt

SEQ ID NO: 987 - RNA, 16 nt, synthetic construct
  misc_feature 1..16: note = Synthetic sequence or unknown origin
  source 1..16: mol_type = other RNA
gttttgccttgaatcc

SEQ ID NO: 988 - RNA, 15 nt, synthetic construct
  misc_feature 1..15: note = Synthetic sequence or unknown origin
  source 1..15: mol_type = other RNA
gttttgccttgaatc

SEQ ID NO: 989 - RNA, 12 nt, synthetic construct
  misc_feature 1..12: note = Synthetic sequence or unknown origin
  source 1..12: mol_type = other RNA
gttttgccttga

SEQ ID NO: 990 - RNA, 10 nt, synthetic construct
  misc_feature 1..10: note = Synthetic sequence or unknown origin
  source 1..10: mol_type = other RNA
gttttgcctt

SEQ ID NO: 991 - RNA, 16 nt, synthetic construct
  misc_feature 1..16: note = Synthetic sequence or unknown origin
  source 1..16: mol_type = other RNA
ggattcaagacaaaat

SEQ ID NO: 992 - RNA, 15 nt, synthetic construct
  misc_feature 1..15: note = Synthetic sequence or unknown origin
  source 1..15: mol_type = other RNA
gattcaagacaaaat

SEQ ID NO: 993 - RNA, 12 nt, synthetic construct
  misc_feature 1..12: note = Synthetic sequence or unknown origin
  source 1..12: mol_type = other RNA
tcaagacaaaat

SEQ ID NO: 994 - RNA, 10 nt, synthetic construct
  misc_feature 1..10: note = Synthetic sequence or unknown origin
  source 1..10: mol_type = other RNA
aagacaaaat

SEQ ID NO: 995 - RNA, 62 nt, synthetic construct
  misc_feature 1..62: note = Synthetic sequence or unknown origin
  source 1..62: mol_type = other RNA
ttgagatgcaaaccgattttcctgactgcaagccagtcacaccggtaacaagagcatttttt

SEQ ID NO: 996 - RNA, 60 nt, synthetic construct
  misc_feature 1..60: note = Synthetic sequence or unknown origin
  source 1..60: mol_type = other RNA
ttgagatgcaaaccgattttcctgactgcaagccagtcacaccggtaacaagagcatttt

SEQ ID NO: 997 - RNA, 37 nt, synthetic construct
  misc_feature 1..37: note = Synthetic sequence or unknown origin
  source 1..37: mol_type = other RNA
aagactgtctcactgtagaagtgaggcagtctttttt

SEQ ID NO: 998 - RNA, 33 nt, synthetic construct
  misc_feature 1..33: note = Synthetic sequence or unknown origin
  source 1..33: mol_type = other RNA
aagactgtctcactgtagaagtgaggcagtctt

SEQ ID NO: 999 - RNA, 31 nt, synthetic construct
  misc_feature 1..31: note = Synthetic sequence or unknown origin
  source 1..31: mol_type = other RNA
aagactgtctcactgtagaagtgaggcagtc

SEQ ID NO: 1000 - RNA, 135 nt, synthetic construct
  misc_feature 1..135: note = Synthetic sequence or unknown origin
  source 1..135: mol_type = other RNA
gttctgccttgaatccgaaaggattcaagacagaatttgagatgcaaaccgattctcctgactgcaagccagtcacaccggtaacaagagcatttcttaagactgtctcactgtagaagtgaggcagtctttttt

SEQ ID NO: 1001 - RNA, 16 nt, synthetic construct
  misc_feature 1..16: note = Synthetic sequence or unknown origin
  source 1..16: mol_type = other RNA
gttctgccttgaatcc

SEQ ID NO: 1002 - RNA, 15 nt, synthetic construct
  misc_feature 1..15: note = Synthetic sequence or unknown origin
  source 1..15: mol_type = other RNA
gttctgccttgaatc

SEQ ID NO: 1003 - RNA, 12 nt, synthetic construct
  misc_feature 1..12: note = Synthetic sequence or unknown origin
  source 1..12: mol_type = other RNA
gttctgccttga

SEQ ID NO: 1004 - RNA, 10 nt, synthetic construct
  misc_feature 1..10: note = Synthetic sequence or unknown origin
  source 1..10: mol_type = other RNA
gttctgcctt

SEQ ID NO: 1005 - RNA, 16 nt, synthetic construct
  misc_feature 1..16: note = Synthetic sequence or unknown origin
  source 1..16: mol_type = other RNA
ggattcaagacagaat

SEQ ID NO: 1006 - RNA, 15 nt, synthetic construct
  misc_feature 1..15: note = Synthetic sequence or unknown origin
  source 1..15: mol_type = other RNA
gattcaagacagaat

SEQ ID NO: 1007 - RNA, 12 nt, synthetic construct
  misc_feature 1..12: note = Synthetic sequence or unknown origin
  source 1..12: mol_type = other RNA
tcaagacagaat

SEQ ID NO: 1008 - RNA, 10 nt, synthetic construct
  misc_feature 1..10: note = Synthetic sequence or unknown origin
  source 1..10: mol_type = other RNA
aagacagaat

SEQ ID NO: 1009 - RNA, 62 nt, synthetic construct
  misc_feature 1..62: note = Synthetic sequence or unknown origin
  source 1..62: mol_type = other RNA
ttgagatgcaaaccgattctcctgactgcaagccagtcacaccggtaacaagagcatttctt

SEQ ID NO: 1010 - RNA, 60 nt, synthetic construct
  misc_feature 1..60: note = Synthetic sequence or unknown origin
  source 1..60: mol_type = other RNA
ttgagatgcaaaccgattctcctgactgcaagccagtcacaccggtaacaagagcatttc

SEQ ID NO: 1011 - RNA, 100 nt, synthetic construct
  misc_feature 1..100: note = Synthetic sequence or unknown origin
  source 1..100: mol_type = other RNA
gttttagttccctgatgttgaaaaccatcaggttactaagataaggtcttagtaccgcaaagctctaacaccttgtttcggcagggtgttatcttttttt

SEQ ID NO: 1012 - RNA, 19 nt, synthetic construct
  misc_feature 1..19: note = Synthetic sequence or unknown origin
  source 1..19: mol_type = other RNA
gttttagttccctgatgtt

SEQ ID NO: 1013 - RNA, 15 nt, synthetic construct
  misc_feature 1..15: note = Synthetic sequence or unknown origin
  source 1..15: mol_type = other RNA
gttttagttccctga

SEQ ID NO: 1014 - RNA, 12 nt, synthetic construct
  misc_feature 1..12: note = Synthetic sequence or unknown origin
  source 1..12: mol_type = other RNA
gttttagttccc

SEQ ID NO: 1015 - RNA, 10 nt, synthetic construct
  misc_feature 1..10: note = Synthetic sequence or unknown origin
  source 1..10: mol_type = other RNA
gttttagttc

SEQ ID NO: 1016 - RNA, 19 nt, synthetic construct
  misc_feature 1..19: note = Synthetic sequence or unknown origin
  source 1..19: mol_type = other RNA
accatcaggttactaagat

SEQ ID NO: 1017 - RNA, 15 nt, synthetic construct
  misc_feature 1..15: note = Synthetic sequence or unknown origin
  source 1..15: mol_type = other RNA
tcaggttactaagat

SEQ ID NO: 1018 - RNA, 12 nt, synthetic construct
  misc_feature 1..12: note = Synthetic sequence or unknown origin
  source 1..12: mol_type = other RNA
ggttactaagat

SEQ ID NO: 1019 - RNA, 10 nt, synthetic construct
  misc_feature 1..10: note = Synthetic sequence or unknown origin
  source 1..10: mol_type = other RNA
ttactaagat

SEQ ID NO: 1020 - RNA, 16 nt, synthetic construct
  misc_feature 1..16: note = Synthetic sequence or unknown origin
  source 1..16: mol_type = other RNA
aaggtcttagtaccgc

SEQ ID NO: 1021 - RNA, 14 nt, synthetic construct
  misc_feature 1..14: note = Synthetic sequence or unknown origin
  source 1..14: mol_type = other RNA
aaggtcttagtacc

SEQ ID NO: 1022 - RNA, 42 nt, synthetic construct
  misc_feature 1..42: note = Synthetic sequence or unknown origin
  source 1..42: mol_type = other RNA
aaagctctaacaccttgtttcggcagggtgttatcttttttt

SEQ ID NO: 1023 - RNA, 38 nt, synthetic construct
  misc_feature 1..38: note = Synthetic sequence or unknown origin
  source 1..38: mol_type = other RNA
aaagctctaacaccttgtttcggcagggtgttatcttt

SEQ ID NO: 1024 - RNA, 35 nt, synthetic construct
  misc_feature 1..35: note = Synthetic sequence or unknown origin
  source 1..35: mol_type = other RNA
aaagctctaacaccttgtttcggcagggtgttatc

SEQ ID NO: 1025 - RNA, 100 nt, synthetic construct
  misc_feature 1..100: note = Synthetic sequence or unknown origin
  source 1..100: mol_type = other RNA
gtcttagttccctgatgttgaaaaccatcaggttactaagataaggtcttagtaccgcaaagctctaacaccttgtttcggcagggtgttatcttttttt

SEQ ID NO: 1026 - RNA, 19 nt, synthetic construct
  misc_feature 1..19: note = Synthetic sequence or unknown origin
  source 1..19: mol_type = other RNA
gtcttagttccctgatgtt

SEQ ID NO: 1027 - RNA, 15 nt, synthetic construct
  misc_feature 1..15: note = Synthetic sequence or unknown origin
  source 1..15: mol_type = other RNA
gtcttagttccctga

SEQ ID NO: 1028 - RNA, 12 nt, synthetic construct
  misc_feature 1..12: note = Synthetic sequence or unknown origin
  source 1..12: mol_type = other RNA
gtcttagttccc

SEQ ID NO: 1029 - RNA, 10 nt, synthetic construct
  misc_feature 1..10: note = Synthetic sequence or unknown origin
  source 1..10: mol_type = other RNA
gtcttagttc

SEQ ID NO: 1030 - RNA, 102 nt, synthetic construct
  misc_feature 1..102: note = Synthetic sequence or unknown origin
  source 1..102: mol_type = other RNA
attttagttcccttttattgaaaaacaaaaggttactaaaacaagggatttattcccgcaaagctctaatccgacaataaacgttgtcggattatctttttt

SEQ ID NO: 1031 - RNA, 19 nt, synthetic construct
  misc_feature 1..19: note = Synthetic sequence or unknown origin
  source 1..19: mol_type = other RNA
attttagttcccttttatt

SEQ ID NO: 1032 - RNA, 15 nt, synthetic construct
  misc_feature 1..15: note = Synthetic sequence or unknown origin
  source 1..15: mol_type = other RNA
attttagttcccttt

SEQ ID NO: 1033 - RNA, 12 nt, synthetic construct
  misc_feature 1..12: note = Synthetic sequence or unknown origin
  source 1..12: mol_type = other RNA
attttagttccc

SEQ ID NO: 1034 - RNA, 10 nt, synthetic construct
  misc_feature 1..10: note = Synthetic sequence or unknown origin
  source 1..10: mol_type = other RNA
attttagttc

SEQ ID NO: 1035 - RNA, 18 nt, synthetic construct
  misc_feature 1..18: note = Synthetic sequence or unknown origin
  source 1..18: mol_type = other RNA
aacaaaaggttactaaaa

SEQ ID NO: 1036 - RNA, 14 nt, synthetic construct
  misc_feature 1..14: note = Synthetic sequence or unknown origin
  source 1..14: mol_type = other RNA
aaaggttactaaaa

SEQ ID NO: 1037 - RNA, 11 nt, synthetic construct
  misc_feature 1..11: note = Synthetic sequence or unknown origin
  source 1..11: mol_type = other RNA
ggttactaaaa

SEQ ID NO: 1038 - RNA, 18 nt, synthetic construct
  misc_feature 1..18: note = Synthetic sequence or unknown origin
  source 1..18: mol_type = other RNA
caagggatttattcccgc

SEQ ID NO: 1039 - RNA, 16 nt, synthetic construct
  misc_feature 1..16: note = Synthetic sequence or unknown origin
  source 1..16: mol_type = other RNA
caagggatttattccc

SEQ ID NO: 1040 - RNA, 43 nt, synthetic construct
  misc_feature 1..43: note = Synthetic sequence or unknown origin
  source 1..43: mol_type = other RNA
aaagctctaatccgacaataaacgttgtcggattatctttttt

SEQ ID NO: 1041 - RNA, 40 nt, synthetic construct
  misc_feature 1..40: note = Synthetic sequence or unknown origin
  source 1..40: mol_type = other RNA
aaagctctaatccgacaataaacgttgtcggattatcttt

SEQ ID NO: 1042 - RNA, 37 nt, synthetic construct
  misc_feature 1..37: note = Synthetic sequence or unknown origin
  source 1..37: mol_type = other RNA
aaagctctaatccgacaataaacgttgtcggattatc

SEQ ID NO: 1043 - RNA, 102 nt, synthetic construct
  misc_feature 1..102: note = Synthetic sequence or unknown origin
  source 1..102: mol_type = other RNA
attctagttcccttctattgaaaaacagaaggttactagaacaagggatttattcccgcaaagctctaatccgacaataaacgttgtcggattatctttttt

SEQ ID NO: 1044 - RNA, 19 nt, synthetic construct
  misc_feature 1..19: note = Synthetic sequence or unknown origin
  source 1..19: mol_type = other RNA
attctagttcccttctatt

SEQ ID NO: 1045 - RNA, 15 nt, synthetic construct
  misc_feature 1..15: note = Synthetic sequence or unknown origin
  source 1..15: mol_type = other RNA
attctagttcccttc

SEQ ID NO: 1046 - RNA, 12 nt, synthetic construct
  misc_feature 1..12: note = Synthetic sequence or unknown origin
  source 1..12: mol_type = other RNA
attctagttccc

SEQ ID NO: 1047 - RNA, 10 nt, synthetic construct
  misc_feature 1..10: note = Synthetic sequence or unknown origin
  source 1..10: mol_type = other RNA
attctagttc

SEQ ID NO: 1048 - RNA, 18 nt, synthetic construct
  misc_feature 1..18: note = Synthetic sequence or unknown origin
  source 1..18: mol_type = other RNA
aacagaaggttactagaa

SEQ ID NO: 1049 - RNA, 14 nt, synthetic construct
  misc_feature 1..14: note = Synthetic sequence or unknown origin
  source 1..14: mol_type = other RNA
gaaggttactagaa

SEQ ID NO: 1050 - RNA, 11 nt, synthetic construct
  misc_feature 1..11: note = Synthetic sequence or unknown origin
  source 1..11: mol_type = other RNA
ggttactagaa

SEQ ID NO: 1051 - RNA, 127 nt, synthetic construct
  misc_feature 1..127: note = Synthetic sequence or unknown origin
  source 1..127: mol_type = other RNA
gttttagttctctgatgggaaaccatcaatgagttctaagataaggcaatatgccgtggggtatggtggtaacctcaaaagcgatccacctttgataaacgtaccgtctggtgcgtttttctttttt

SEQ ID NO: 1052 - RNA, 18 nt, synthetic construct
  misc_feature 1..18: note = Synthetic sequence or unknown origin
  source 1..18: mol_type = other RNA
gttttagttctctgatgg

SEQ ID NO: 1053 - RNA, 15 nt, synthetic construct
  misc_feature 1..15: note = Synthetic sequence or unknown origin
  source 1..15: mol_type = other RNA
gttttagttctctga

SEQ ID NO: 1054 - RNA, 12 nt, synthetic construct
  misc_feature 1..12: note = Synthetic sequence or unknown origin
  source 1..12: mol_type = other RNA
gttttagttctc

SEQ ID NO: 1055 - RNA, 10 nt, synthetic construct
  misc_feature 1..10: note = Synthetic sequence or unknown origin
  source 1..10: mol_type = other RNA
gttttagttc

SEQ ID NO: 1056 - RNA, 20 nt, synthetic construct
  misc_feature 1..20: note = Synthetic sequence or unknown origin
  source 1..20: mol_type = other RNA
ccatcaatgagttctaagat

SEQ ID NO: 1057 - RNA, 17 nt, synthetic construct
  misc_feature 1..17: note = Synthetic sequence or unknown origin
  source 1..17: mol_type = other RNA
tcaatgagttctaagat

SEQ ID NO: 1058 - RNA, 14 nt, synthetic construct
  misc_feature 1..14: note = Synthetic sequence or unknown origin
  source 1..14: mol_type = other RNA
atgagttctaagat

SEQ ID NO: 1059 - RNA, 10 nt, synthetic construct
  misc_feature 1..10: note = Synthetic sequence or unknown origin
  source 1..10: mol_type = other RNA
gttctaagat

SEQ ID NO: 1060 - RNA, 22 nt, synthetic construct
  misc_feature 1..22: note = Synthetic sequence or unknown origin
  source 1..22: mol_type = other RNA
aaggcaatatgccgtggggtat

SEQ ID NO: 1061 - RNA, 22 nt, synthetic construct
  misc_feature 1..22: note = Synthetic sequence or unknown origin
  source 1..22: mol_type = other RNA
aaggcaatatgccgtggggtat

SEQ ID NO: 1062 - RNA, 29 nt, synthetic construct
  misc_feature 1..29: note = Synthetic sequence or unknown origin
  source 1..29: mol_type = other RNA
ggtggtaacctcaaaagcgatccaccttt

SEQ ID NO: 1063 - RNA, 26 nt, synthetic construct
  misc_feature 1..26: note = Synthetic sequence or unknown origin
  source 1..26: mol_type = other RNA
ggtggtaacctcaaaagcgatccacc

SEQ ID NO: 1064 - RNA, 34 nt, synthetic construct
  misc_feature 1..34: note = Synthetic sequence or unknown origin
  source 1..34: mol_type = other RNA
gataaacgtaccgtctggtgcgtttttctttttt

SEQ ID NO: 1065 - RNA, 28 nt, synthetic construct
  misc_feature 1..28: note = Synthetic sequence or unknown origin
  source 1..28: mol_type = other RNA
gataaacgtaccgtctggtgcgtttttc

SEQ ID NO: 1066 - RNA, 28 nt, synthetic construct
  misc_feature 1..28: note = Synthetic sequence or unknown origin
  source 1..28: mol_type = other RNA
gataaacgtaccgtctggtgcgtttttc

SEQ ID NO: 1067 - RNA, 127 nt, synthetic construct
  misc_feature 1..127: note = Synthetic sequence or unknown origin
  source 1..127: mol_type = other RNA
gtcttagttctctgatgggaaaccatcaatgagttctaagataaggcaatatgccgtggggtatggtggtaacctcaaaagcgatccacctttgataaacgtaccgtctggtgcgtttctctttttt

SEQ ID NO: 1068 - RNA, 18 nt, synthetic construct
  misc_feature 1..18: note = Synthetic sequence or unknown origin
  source 1..18: mol_type = other RNA
gtcttagttctctgatgg

SEQ ID NO: 1069 - RNA, 15 nt, synthetic construct
  misc_feature 1..15: note = Synthetic sequence or unknown origin
  source 1..15: mol_type = other RNA
gtcttagttctctga

SEQ ID NO: 1070 - RNA, 12 nt, synthetic construct
  misc_feature 1..12: note = Synthetic sequence or unknown origin
  source 1..12: mol_type = other RNA
gtcttagttctc

SEQ ID NO: 1071 - RNA, 10 nt, synthetic construct
  misc_feature 1..10: note = Synthetic sequence or unknown origin
  source 1..10: mol_type = other RNA
gtcttagttc

SEQ ID NO: 1072 - RNA, 34 nt, synthetic construct
  misc_feature 1..34: note = Synthetic sequence or unknown origin
  source 1..34: mol_type = other RNA
gataaacgtaccgtctggtgcgtttctctttttt

SEQ ID NO: 1073 - RNA, 28 nt, synthetic construct
  misc_feature 1..28: note = Synthetic sequence or unknown origin
  source 1..28: mol_type = other RNA
gataaacgtaccgtctggtgcgtttctc

SEQ ID NO: 1074 - RNA, 28 nt, synthetic construct
  misc_feature 1..28: note = Synthetic sequence or unknown origin
  source 1..28: mol_type = other RNA
gataaacgtaccgtctggtgcgtttctc

SEQ ID NO: 1075 - RNA, 121 nt, synthetic construct
  misc_feature 1..121: note = Synthetic sequence or unknown origin
  source 1..121: mol_type = other RNA
gttttagttctctgatgggaaaccatcaatgagttctaagataaggcaatatgccgtggggtatggtggtaacctcaaaagcgatccacctttgataaacgtaccgtctggtgcgtttttt

SEQ ID NO: 1076 - RNA, 32 nt, synthetic construct
  misc_feature 1..32: note = Synthetic sequence or unknown origin
  source 1..32: mol_type = other RNA
ggtggtaacctcaaaagcgatccacctttgat

SEQ ID NO: 1077 - RNA, 25 nt, synthetic construct
  misc_feature 1..25: note = Synthetic sequence or unknown origin
  source 1..25: mol_type = other RNA
aaacgtaccgtctggtgcgtttttt

SEQ ID NO: 1078 - RNA, 22 nt, synthetic construct
  misc_feature 1..22: note = Synthetic sequence or unknown origin
  source 1..22: mol_type = other RNA
aaacgtaccgtctggtgcgttt

SEQ ID NO: 1079 - RNA, 19 nt, synthetic construct
  misc_feature 1..19: note = Synthetic sequence or unknown origin
  source 1..19: mol_type = other RNA
aaacgtaccgtctggtgcg

SEQ ID NO: 1080 - RNA, 121 nt, synthetic construct
  misc_feature 1..121: note = Synthetic sequence or unknown origin
  source 1..121: mol_type = other RNA
gtcttagttctctgatgggaaaccatcaatgagttctaagataaggcaatatgccgtggggtatggtggtaacctcaaaagcgatccacctttgataaacgtaccgtctggtgcgtttttt

SEQ ID NO: 1081 - RNA, 112 nt, synthetic construct
  misc_feature 1..112: note = Synthetic sequence or unknown origin
  source 1..112: mol_type = other RNA
attttagttccctaattttgaaaaaagttaggttactaaaacaagggttccttacgaggagacccgcaaagctctaagttcgctgggtttctcagcggacttatcttttttt

SEQ ID NO: 1082 - RNA, 19 nt, synthetic construct
  misc_feature 1..19: note = Synthetic sequence or unknown origin
  source 1..19: mol_type = other RNA
attttagttccctaatttt

SEQ ID NO: 1083 - RNA, 15 nt, synthetic construct
  misc_feature 1..15: note = Synthetic sequence or unknown origin
  source 1..15: mol_type = other RNA
attttagttccctaa

SEQ ID NO: 1084 - RNA, 12 nt, synthetic construct
  misc_feature 1..12: note = Synthetic sequence or unknown origin
  source 1..12: mol_type = other RNA
attttagttccc

SEQ ID NO: 1085 - RNA, 10 nt, synthetic construct
  misc_feature 1..10: note = Synthetic sequence or unknown origin
  source 1..10: mol_type = other RNA
attttagttc

SEQ ID NO: 1086 - RNA, 18 nt, synthetic construct
  misc_feature 1..18: note = Synthetic sequence or unknown origin
  source 1..18: mol_type = other RNA
aaagttaggttactaaaa

SEQ ID NO: 1087 - RNA, 14 nt, synthetic construct
  misc_feature 1..14: note = Synthetic sequence or unknown origin
  source 1..14: mol_type = other RNA
ttaggttactaaaa

SEQ ID NO: 1088 - RNA, 11 nt, synthetic construct
  misc_feature 1..11: note = Synthetic sequence or unknown origin
  source 1..11: mol_type = other RNA
ggttactaaaa

SEQ ID NO: 1089 - RNA, 26 nt, synthetic construct
  misc_feature 1..26: note = Synthetic sequence or unknown origin
  source 1..26: mol_type = other RNA
caagggttccttacgaggagacccgc

SEQ ID NO: 1090 - RNA, 24 nt, synthetic construct
  misc_feature 1..24: note = Synthetic sequence or unknown origin
  source 1..24: mol_type = other RNA
caagggttccttacgaggagaccc

SEQ ID NO: 1091 - RNA, 45 nt, synthetic construct
  misc_feature 1..45: note = Synthetic sequence or unknown origin
  source 1..45: mol_type = other RNA
aaagctctaagttcgctgggtttctcagcggacttatcttttttt

SEQ ID NO: 1092 - RNA, 41 nt, synthetic construct
  misc_feature 1..41: note = Synthetic sequence or unknown origin
  source 1..41: mol_type = other RNA
aaagctctaagttcgctgggtttctcagcggacttatcttt

SEQ ID NO: 1093 - RNA, 38 nt, synthetic construct
  misc_feature 1..38: note = Synthetic sequence or unknown origin
  source 1..38: mol_type = other RNA
aaagctctaagttcgctgggtttctcagcggacttatc

SEQ ID NO: 1094 - RNA, 112 nt, synthetic construct
  misc_feature 1..112: note = Synthetic sequence or unknown origin
  source 1..112: mol_type = other RNA
attctagttccctaactttgaaaaaagttaggttactagaacaagggttccttacgaggagacccgcaaagctctaagttcgctgggtttctcagcggacttatcttttttt

SEQ ID NO: 1095 - RNA, 19 nt, synthetic construct
  misc_feature 1..19: note = Synthetic sequence or unknown origin
  source 1..19: mol_type = other RNA
attctagttccctaacttt

SEQ ID NO: 1096 - RNA, 15 nt, synthetic construct
  misc_feature 1..15: note = Synthetic sequence or unknown origin
  source 1..15: mol_type = other RNA
attctagttccctaa

SEQ ID NO: 1097 - RNA, 12 nt, synthetic construct
  misc_feature 1..12: note = Synthetic sequence or unknown origin
  source 1..12: mol_type = other RNA
attctagttccc

SEQ ID NO: 1098 - RNA, 10 nt, synthetic construct
  misc_feature 1..10: note = Synthetic sequence or unknown origin
  source 1..10: mol_type = other RNA
attctagttc

SEQ ID NO: 1099 - RNA, 18 nt, synthetic construct
  misc_feature 1..18: note = Synthetic sequence or unknown origin
  source 1..18: mol_type = other RNA
aaagttaggttactagaa

SEQ ID NO: 1100 - RNA, 14 nt, synthetic construct
  misc_feature 1..14: note = Synthetic sequence or unknown origin
  source 1..14: mol_type = other RNA
ttaggttactagaa

SEQ ID NO: 1101 - RNA, 11 nt, synthetic construct
  misc_feature 1..11: note = Synthetic sequence or unknown origin
  source 1..11: mol_type = other RNA
ggttactagaa

SEQ ID NO: 1102 - RNA, 109 nt, synthetic construct
  misc_feature 1..109: note = Synthetic sequence or unknown origin
  source 1..109: mol_type = other RNA
gctgtagccccctgttattgaaaagtaacacgtcgctacagtaaggctccgtcgtggacggatgccgcaaagctctaaacccattcttcggaatgggtttatctttttt

SEQ ID NO: 1103 - RNA, 19 nt, synthetic construct
  misc_feature 1..19: note = Synthetic sequence or unknown origin
  source 1..19: mol_type = other RNA
gctgtagccccctgttatt

SEQ ID NO: 1104 - RNA, 15 nt, synthetic construct
  misc_feature 1..15: note = Synthetic sequence or unknown origin
  source 1..15: mol_type = other RNA
gctgtagccccctgt

SEQ ID NO: 1105 - RNA, 12 nt, synthetic construct
  misc_feature 1..12: note = Synthetic sequence or unknown origin
  source 1..12: mol_type = other RNA
gctgtagccccc

SEQ ID NO: 1106 - RNA, 10 nt, synthetic construct
  misc_feature 1..10: note = Synthetic sequence or unknown origin
  source 1..10: mol_type = other RNA
gctgtagccc

SEQ ID NO: 1107 - RNA, 19 nt, synthetic construct
  misc_feature 1..19: note = Synthetic sequence or unknown origin
  source 1..19: mol_type = other RNA
agtaacacgtcgctacagt

SEQ ID NO: 1108 - RNA, 15 nt, synthetic construct
  misc_feature 1..15: note = Synthetic sequence or unknown origin
  source 1..15: mol_type = other RNA
acacgtcgctacagt

SEQ ID NO: 1109 - RNA, 12 nt, synthetic construct
  misc_feature 1..12: note = Synthetic sequence or unknown origin
  source 1..12: mol_type = other RNA
cgtcgctacagt

SEQ ID NO: 1110 - RNA, 10 nt, synthetic construct
  misc_feature 1..10: note = Synthetic sequence or unknown origin
  source 1..10: mol_type = other RNA
tcgctacagt

SEQ ID NO: 1111 - RNA, 26 nt, synthetic construct
  misc_feature 1..26: note = Synthetic sequence or unknown origin
  source 1..26: mol_type = other RNA
aaggctccgtcgtggacggatgccgc

SEQ ID NO: 1112 - RNA, 24 nt, synthetic construct
  misc_feature 1..24: note = Synthetic sequence or unknown origin
  source 1..24: mol_type = other RNA
aaggctccgtcgtggacggatgcc

SEQ ID NO: 1113 - RNA, 41 nt, synthetic construct
  misc_feature 1..41: note = Synthetic sequence or unknown origin
  source 1..41: mol_type = other RNA
aaagctctaaacccattcttcggaatgggtttatctttttt

SEQ ID NO: 1114 - RNA, 38 nt, synthetic construct
  misc_feature 1..38: note = Synthetic sequence or unknown origin
  source 1..38: mol_type = other RNA
aaagctctaaacccattcttcggaatgggtttatcttt

SEQ ID NO: 1115 - RNA, 35 nt, synthetic construct
  misc_feature 1..35: note = Synthetic sequence or unknown origin
  source 1..35: mol_type = other RNA
aaagctctaaacccattcttcggaatgggtttatc

SEQ ID NO: 1116 - RNA, 156 nt, synthetic construct
  misc_feature 1..156: note = Synthetic sequence or unknown origin
  source 1..156: mol_type = other RNA
gttatagttccctaacaatgaaaattgttttaggtttctataataatttagcaacttagggcggcgattttggtcgtgcagctacggttgagaattctattgtgaatctaaagcaaagctctaatccgctcactagttgggcggattatctttttt

SEQ ID NO: 1117 - RNA, 19 nt, synthetic construct
  misc_feature 1..19: note = Synthetic sequence or unknown origin
  source 1..19: mol_type = other RNA
gttatagttccctaacaat

SEQ ID NO: 1118 - RNA, 15 nt, synthetic construct
  misc_feature 1..15: note = Synthetic sequence or unknown origin
  source 1..15: mol_type = other RNA
gttatagttccctaa

SEQ ID NO: 1119 - RNA, 12 nt, synthetic construct
  misc_feature 1..12: note = Synthetic sequence or unknown origin
  source 1..12: mol_type = other RNA
gttatagttccc

SEQ ID NO: 1120 - RNA, 10 nt, synthetic construct
  misc_feature 1..10: note = Synthetic sequence or unknown origin
  source 1..10: mol_type = other RNA
gttatagttc

SEQ ID NO: 1121 - RNA, 21 nt, synthetic construct
  misc_feature 1..21: note = Synthetic sequence or unknown origin
  source 1..21: mol_type = other RNA
attgttttaggtttctataat

SEQ ID NO: 1122 - RNA, 17 nt, synthetic construct
  misc_feature 1..17: note = Synthetic sequence or unknown origin
  source 1..17: mol_type = other RNA
ttttaggtttctataat

SEQ ID NO: 1123 - RNA, 12 nt, synthetic construct
  misc_feature 1..12: note = Synthetic sequence or unknown origin
  source 1..12: mol_type = other RNA
ggtttctataat

SEQ ID NO: 1124 - RNA, 10 nt, synthetic construct
  misc_feature 1..10: note = Synthetic sequence or unknown origin
  source 1..10: mol_type = other RNA
tttctataat

SEQ ID NO: 1125 - RNA, 35 nt, synthetic construct
  misc_feature 1..35: note = Synthetic sequence or unknown origin
  source 1..35: mol_type = other RNA
aatttagcaacttagggcggcgattttggtcgtgc

SEQ ID NO: 1126 - RNA, 42 nt, synthetic construct
  misc_feature 1..42: note = Synthetic sequence or unknown origin
  source 1..42: mol_type = other RNA
agctacggttgagaattctattgtgaatctaaagcaaagctc

SEQ ID NO: 1127 - RNA, 41 nt, synthetic construct
  misc_feature 1..41: note = Synthetic sequence or unknown origin
  source 1..41: mol_type = other RNA
agctacggttgagaattctattgtgaatctaaagcaaagct

SEQ ID NO: 1128 - RNA, 35 nt, synthetic construct
  misc_feature 1..35: note = Synthetic sequence or unknown origin
  source 1..35: mol_type = other RNA
taatccgctcactagttgggcggattatctttttt

SEQ ID NO: 1129 - RNA, 27 nt, synthetic construct
  misc_feature 1..27: note = Synthetic sequence or unknown origin
  source 1..27: mol_type = other RNA
taatccgctcactagttgggcggatta

SEQ ID NO: 1130 - RNA, 29 nt, synthetic construct
  misc_feature 1..29: note = Synthetic sequence or unknown origin
  source 1..29: mol_type = other RNA
taatccgctcactagttgggcggattatc

SEQ ID NO: 1131 - RNA, 156 nt, synthetic construct
  misc_feature 1..156: note = Synthetic sequence or unknown origin
  source 1..156: mol_type = other RNA
gttatagttccctaacaatgaaaattgttctaggtttctataataatttagcaacttagggcggcgatcttggtcgtgcagctacggttgagaattctattgtgaatctaaagcaaagctctaatccgctcactagttgggcggattatctttttt

SEQ ID NO: 1132 - RNA, 21 nt, synthetic construct
  misc_feature 1..21: note = Synthetic sequence or unknown origin
  source 1..21: mol_type = other RNA
attgttctaggtttctataat

SEQ ID NO: 1133 - RNA, 17 nt, synthetic construct
  misc_feature 1..17: note = Synthetic sequence or unknown origin
  source 1..17: mol_type = other RNA
ttctaggtttctataat

SEQ ID NO: 1134 - RNA, 35 nt, synthetic construct
  misc_feature 1..35: note = Synthetic sequence or unknown origin
  source 1..35: mol_type = other RNA
aatttagcaacttagggcggcgatcttggtcgtgc

SEQ ID NO: 1135 - RNA, 46 nt, synthetic construct
  misc_feature 1..46: note = Synthetic sequence or unknown origin
  source 1..46: mol_type = other RNA
aatttagcaacttagggcggcgatcttggtcgtgcagctacggttg

SEQ ID NO: 1136 - RNA, 90 nt, synthetic construct
  misc_feature 1..90: note = Synthetic sequence or unknown origin
  source 1..90: mol_type = other RNA
attttagtacctgaaaaaagaaattttttcagaatctactaaaacaaggctttatgccgaaatcaaggacatcgacggatgtcctttttt

SEQ ID NO: 1137 - RNA, 19 nt, synthetic construct
  misc_feature 1..19: note = Synthetic sequence or unknown origin
  source 1..19: mol_type = other RNA
attttagtacctgaaaaaa

SEQ ID NO: 1138 - RNA, 15 nt, synthetic construct
  misc_feature 1..15: note = Synthetic sequence or unknown origin
  source 1..15: mol_type = other RNA
attttagtacctgaa

SEQ ID NO: 1139 - RNA, 12 nt, synthetic construct
  misc_feature 1..12: note = Synthetic sequence or unknown origin
  source 1..12: mol_type = other RNA
attttagtacct

SEQ ID NO: 1140 - RNA, 10 nt, synthetic construct
  misc_feature 1..10: note = Synthetic sequence or unknown origin
  source 1..10: mol_type = other RNA
attttagtac

SEQ ID NO: 1141 - RNA, 21 nt, synthetic construct
  misc_feature 1..21: note = Synthetic sequence or unknown origin
  source 1..21: mol_type = other RNA
ttttttcagaatctactaaaa

SEQ ID NO: 1142 - RNA, 17 nt, synthetic construct
  misc_feature 1..17: note = Synthetic sequence or unknown origin
  source 1..17: mol_type = other RNA
ttcagaatctactaaaa

SEQ ID NO: 1143 - RNA, 14 nt, synthetic construct
  misc_feature 1..14: note = Synthetic sequence or unknown origin
  source 1..14: mol_type = other RNA
agaatctactaaaa

SEQ ID NO: 1144 - RNA, 12 nt, synthetic construct
  misc_feature 1..12: note = Synthetic sequence or unknown origin
  source 1..12: mol_type = other RNA
aatctactaaaa

SEQ ID NO: 1145 - RNA, 20 nt, synthetic construct
  misc_feature 1..20: note = Synthetic sequence or unknown origin
  source 1..20: mol_type = other RNA
caaggctttatgccgaaatc

SEQ ID NO: 1146 - RNA, 14 nt, synthetic construct
  misc_feature 1..14: note = Synthetic sequence or unknown origin
  source 1..14: mol_type = other RNA
caaggctttatgcc

SEQ ID NO: 1147 - RNA, 26 nt, synthetic construct
  misc_feature 1..26: note = Synthetic sequence or unknown origin
  source 1..26: mol_type = other RNA
aaggacatcgacggatgtcctttttt

SEQ ID NO: 1148 - RNA, 22 nt, synthetic construct
  misc_feature 1..22: note = Synthetic sequence or unknown origin
  source 1..22: mol_type = other RNA
aaggacatcgacggatgtcctt

SEQ ID NO: 1149 - RNA, 20 nt, synthetic construct
  misc_feature 1..20: note = Synthetic sequence or unknown origin
  source 1..20: mol_type = other RNA
aaggacatcgacggatgtcc

SEQ ID NO: 1150 - RNA, 90 nt, synthetic construct
  misc_feature 1..90: note = Synthetic sequence or unknown origin
  source 1..90: mol_type = other RNA
attctagtacctgaaagaagaaattctttcagaatctactagaacaaggctttatgccgaaatcaaggacatcgacggatgtcctttttt

SEQ ID NO: 1151 - RNA, 19 nt, synthetic construct
  misc_feature 1..19: note = Synthetic sequence or unknown origin
  source 1..19: mol_type = other RNA
attctagtacctgaaagaa

SEQ ID NO: 1152 - RNA, 15 nt, synthetic construct
  misc_feature 1..15: note = Synthetic sequence or unknown origin
  source 1..15: mol_type = other RNA
attctagtacctgaa

SEQ ID NO: 1153 - RNA, 12 nt, synthetic construct
  misc_feature 1..12: note = Synthetic sequence or unknown origin
  source 1..12: mol_type = other RNA
attctagtacct

SEQ ID NO: 1154 - RNA, 10 nt, synthetic construct
  misc_feature 1..10: note = Synthetic sequence or unknown origin
  source 1..10: mol_type = other RNA
attctagtac

SEQ ID NO: 1155 - RNA, 21 nt, synthetic construct
  misc_feature 1..21: note = Synthetic sequence or unknown origin
  source 1..21: mol_type = other RNA
ttctttcagaatctactagaa

SEQ ID NO: 1156 - RNA, 17 nt, synthetic construct
  misc_feature 1..17: note = Synthetic sequence or unknown origin
  source 1..17: mol_type = other RNA
ttcagaatctactagaa

SEQ ID NO: 1157 - RNA, 14 nt, synthetic construct
  misc_feature 1..14: note = Synthetic sequence or unknown origin
  source 1..14: mol_type = other RNA
agaatctactagaa

SEQ ID NO: 1158 - RNA, 12 nt, synthetic construct
  misc_feature 1..12: note = Synthetic sequence or unknown origin
  source 1..12: mol_type = other RNA
aatctactagaa

SEQ ID NO: 1159 - RNA, 103 nt, synthetic construct
  misc_feature 1..103: note = Synthetic sequence or unknown origin
  source 1..103: mol_type = other RNA
attttagtacctgaaaaaagaaattttttcagaatctactaaaacaaggctttatgccgaaatcaaggacatcgacggatgtccttttttctttgcatttttt

SEQ ID NO: 1160 - RNA, 14 nt, synthetic construct
  misc_feature 1..14: note = Synthetic sequence or unknown origin
  source 1..14: mol_type = other RNA
caaggctttatgcc

SEQ ID NO: 1161 - RNA, 45 nt, synthetic construct
  misc_feature 1..45: note = Synthetic sequence or unknown origin
  source 1..45: mol_type = other RNA
gaaatcaaggacatcgacggatgtccttttttctttgcatttttt

SEQ ID NO: 1162 - RNA, 33 nt, synthetic construct
  misc_feature 1..33: note = Synthetic sequence or unknown origin
  source 1..33: mol_type = other RNA
gaaatcaaggacatcgacggatgtccttttttc

SEQ ID NO: 1163 - RNA, 39 nt, synthetic construct
  misc_feature 1..39: note = Synthetic sequence or unknown origin
  source 1..39: mol_type = other RNA
gaaatcaaggacatcgacggatgtccttttttctttgca

SEQ ID NO: 1164 - RNA, 103 nt, synthetic construct
  misc_feature 1..103: note = Synthetic sequence or unknown origin
  source 1..103: mol_type = other RNA
attctagtacctgaaagaagaaattctttcagaatctactagaacaaggctttatgccgaaatcaaggacatcgacggatgtccttctttctttgcatttttt

SEQ ID NO: 1165 - RNA, 45 nt, synthetic construct
  misc_feature 1..45: note = Synthetic sequence or unknown origin
  source 1..45: mol_type = other RNA
gaaatcaaggacatcgacggatgtccttctttctttgcatttttt

SEQ ID NO: 1166 - RNA, 33 nt, synthetic construct
  misc_feature 1..33: note = Synthetic sequence or unknown origin
  source 1..33: mol_type = other RNA
gaaatcaaggacatcgacggatgtccttctttc

SEQ ID NO: 1167 - RNA, 39 nt, synthetic construct
  misc_feature 1..39: note = Synthetic sequence or unknown origin
  source 1..39: mol_type = other RNA
gaaatcaaggacatcgacggatgtccttctttctttgca

SEQ ID NO: 1168 - RNA, 98 nt, synthetic construct
  misc_feature 1..98: note = Synthetic sequence or unknown origin
  source 1..98: mol_type = other RNA
gctgtagttcccggttattgaaaagtaacaggtttctacagtaaggtagaacacctaaaagctctaatcccattcttcggaatgggattatctttttt

SEQ ID NO: 1169 - RNA, 19 nt, synthetic construct
  misc_feature 1..19: note = Synthetic sequence or unknown origin
  source 1..19: mol_type = other RNA
gctgtagttcccggttatt

SEQ ID NO: 1170 - RNA, 15 nt, synthetic construct
  misc_feature 1..15: note = Synthetic sequence or unknown origin
  source 1..15: mol_type = other RNA
gctgtagttcccggt

SEQ ID NO: 1171 - RNA, 12 nt, synthetic construct
  misc_feature 1..12: note = Synthetic sequence or unknown origin
  source 1..12: mol_type = other RNA
gctgtagttccc

SEQ ID NO: 1172 - RNA, 10 nt, synthetic construct
  misc_feature 1..10: note = Synthetic sequence or unknown origin
  source 1..10: mol_type = other RNA
gctgtagttc

SEQ ID NO: 1173 - RNA, 19 nt, synthetic construct
  misc_feature 1..19: note = Synthetic sequence or unknown origin
  source 1..19: mol_type = other RNA
agtaacaggtttctacagt

SEQ ID NO: 1174 - RNA, 15 nt, synthetic construct
  misc_feature 1..15: note = Synthetic sequence or unknown origin
  source 1..15: mol_type = other RNA
acaggtttctacagt

SEQ ID NO: 1175 - RNA, 19 nt, synthetic construct
  misc_feature 1..19: note = Synthetic sequence or unknown origin
  source 1..19: mol_type = other RNA
agtaacaggtttctacagt

SEQ ID NO: 1176 - RNA, 10 nt, synthetic construct
  misc_feature 1..10: note = Synthetic sequence or unknown origin
  source 1..10: mol_type = other RNA
tttctacagt

SEQ ID NO: 1177 - RNA, 14 nt, synthetic construct
  misc_feature 1..14: note = Synthetic sequence or unknown origin
  source 1..14: mol_type = other RNA
aaggtagaacacct

SEQ ID NO: 1178 - RNA, 14 nt, synthetic construct
  misc_feature 1..14: note = Synthetic sequence or unknown origin
  source 1..14: mol_type = other RNA
aaggtagaacacct

SEQ ID NO: 1179 - RNA, 42 nt, synthetic construct
  misc_feature 1..42: note = Synthetic sequence or unknown origin
  source 1..42: mol_type = other RNA
aaaagctctaatcccattcttcggaatgggattatctttttt

SEQ ID NO: 1180 - RNA, 40 nt, synthetic construct
  misc_feature 1..40: note = Synthetic sequence or unknown origin
  source 1..40: mol_type = other RNA
aaaagctctaatcccattcttcggaatgggattatctttt

SEQ ID NO: 1181 - RNA, 36 nt, synthetic construct
  misc_feature 1..36: note = Synthetic sequence or unknown origin
  source 1..36: mol_type = other RNA
aaaagctctaatcccattcttcggaatgggattatc

SEQ ID NO: 1182 - RNA, 96 nt, synthetic construct
  misc_feature 1..96: note = Synthetic sequence or unknown origin
  source 1..96: mol_type = other RNA
gctgtagttcccggttattgaaaagtaacaggtttctacagtaaggtagaacacctaaaagctctaatcccattcttcggaatgggattatttttt

SEQ ID NO: 1183 - RNA, 22 nt, synthetic construct
  misc_feature 1..22: note = Synthetic sequence or unknown origin
  source 1..22: mol_type = other RNA
aaggtagaacacctaaaagctc

SEQ ID NO: 1184 - RNA, 32 nt, synthetic construct
  misc_feature 1..32: note = Synthetic sequence or unknown origin
  source 1..32: mol_type = other RNA
taatcccattcttcggaatgggattatttttt

SEQ ID NO: 1185 - RNA, 26 nt, synthetic construct
  misc_feature 1..26: note = Synthetic sequence or unknown origin
  source 1..26: mol_type = other RNA
taatcccattcttcggaatgggatta

SEQ ID NO: 1186 - RNA, 26 nt, synthetic construct
  misc_feature 1..26: note = Synthetic sequence or unknown origin
  source 1..26: mol_type = other RNA
taatcccattcttcggaatgggatta

SEQ ID NO: 1187 - RNA, 121 nt, synthetic construct
  misc_feature 1..121: note = Synthetic sequence or unknown origin
  source 1..121: mol_type = other RNA
gttttagttccctattttggaaataaaataggttactaaaataaaggtggcagtttactgctacctatggtaattcgtaagaattatccagtaagtggttgccgacgggcaaccttttttt

SEQ ID NO: 1188 - RNA, 19 nt, synthetic construct
  misc_feature 1..19: note = Synthetic sequence or unknown origin
  source 1..19: mol_type = other RNA
gttttagttccctattttg

SEQ ID NO: 1189 - RNA, 15 nt, synthetic construct
  misc_feature 1..15: note = Synthetic sequence or unknown origin
  source 1..15: mol_type = other RNA
gttttagttccctat

SEQ ID NO: 1190 - RNA, 12 nt, synthetic construct
  misc_feature 1..12: note = Synthetic sequence or unknown origin
  source 1..12: mol_type = other RNA
gttttagttccc

SEQ ID NO: 1191 - RNA, 10 nt, synthetic construct
  misc_feature 1..10: note = Synthetic sequence or unknown origin
  source 1..10: mol_type = other RNA
gttttagttc

SEQ ID NO: 1192 - RNA, 19 nt, synthetic construct
  misc_feature 1..19: note = Synthetic sequence or unknown origin
  source 1..19: mol_type = other RNA
taaaataggttactaaaat

SEQ ID NO: 1193 - RNA, 15 nt, synthetic construct
  misc_feature 1..15: note = Synthetic sequence or unknown origin
  source 1..15: mol_type = other RNA
ataggttactaaaat

SEQ ID NO: 1194 - RNA, 12 nt, synthetic construct
  misc_feature 1..12: note = Synthetic sequence or unknown origin
  source 1..12: mol_type = other RNA
ggttactaaaat

SEQ ID NO: 1195 - RNA, 10 nt, synthetic construct
  misc_feature 1..10: note = Synthetic sequence or unknown origin
  source 1..10: mol_type = other RNA
ttactaaaat

SEQ ID NO: 1196 - RNA, 25 nt, synthetic construct
  misc_feature 1..25: note = Synthetic sequence or unknown origin
  source 1..25: mol_type = other RNA
aaaggtggcagtttactgctaccta

SEQ ID NO: 1197 - RNA, 24 nt, synthetic construct
  misc_feature 1..24: note = Synthetic sequence or unknown origin
  source 1..24: mol_type = other RNA
aaaggtggcagtttactgctacct

SEQ ID NO: 1198 - RNA, 29 nt, synthetic construct
  misc_feature 1..29: note = Synthetic sequence or unknown origin
  source 1..29: mol_type = other RNA
tggtaattcgtaagaattatccagtaagt

SEQ ID NO: 1199 - RNA, 23 nt, synthetic construct
  misc_feature 1..23: note = Synthetic sequence or unknown origin
  source 1..23: mol_type = other RNA
tggtaattcgtaagaattatcca

SEQ ID NO: 1200 - RNA, 25 nt, synthetic construct
  misc_feature 1..25: note = Synthetic sequence or unknown origin
  source 1..25: mol_type = other RNA
ggttgccgacgggcaaccttttttt

SEQ ID NO: 1201 - RNA, 18 nt, synthetic construct
  misc_feature 1..18: note = Synthetic sequence or unknown origin
  source 1..18: mol_type = other RNA
ggttgccgacgggcaacc

SEQ ID NO: 1202 - RNA, 18 nt, synthetic construct
  misc_feature 1..18: note = Synthetic sequence or unknown origin
  source 1..18: mol_type = other RNA
ggttgccgacgggcaacc

SEQ ID NO: 1203 - RNA, 121 nt, synthetic construct
  misc_feature 1..121: note = Synthetic sequence or unknown origin
  source 1..121: mol_type = other RNA
gttctagttccctattctggaaatagaataggttactagaataaaggtggcagtttactgctacctatggtaattcgtaagaattatccagtaagtggttgccgacgggcaaccttttttt

SEQ ID NO: 1204 - RNA, 19 nt, synthetic construct
  misc_feature 1..19: note = Synthetic sequence or unknown origin
  source 1..19: mol_type = other RNA
gttctagttccctattctg

SEQ ID NO: 1205 - RNA, 15 nt, synthetic construct
  misc_feature 1..15: note = Synthetic sequence or unknown origin
  source 1..15: mol_type = other RNA
gttctagttccctat

SEQ ID NO: 1206 - RNA, 12 nt, synthetic construct
  misc_feature 1..12: note = Synthetic sequence or unknown origin
  source 1..12: mol_type = other RNA
gttctagttccc

SEQ ID NO: 1207 - RNA, 10 nt, synthetic construct
  misc_feature 1..10: note = Synthetic sequence or unknown origin
  source 1..10: mol_type = other RNA
gttctagttc

SEQ ID NO: 1208 - RNA, 19 nt, synthetic construct
  misc_feature 1..19: note = Synthetic sequence or unknown origin
  source 1..19: mol_type = other RNA
tagaataggttactagaat

SEQ ID NO: 1209 - RNA, 15 nt, synthetic construct
  misc_feature 1..15: note = Synthetic sequence or unknown origin
  source 1..15: mol_type = other RNA
ataggttactagaat

SEQ ID NO: 1210 - RNA, 12 nt, synthetic construct
  misc_feature 1..12: note = Synthetic sequence or unknown origin
  source 1..12: mol_type = other RNA
ggttactagaat

SEQ ID NO: 1211 - RNA, 10 nt, synthetic construct
  misc_feature 1..10: note = Synthetic sequence or unknown origin
  source 1..10: mol_type = other RNA
ttactagaat

SEQ ID NO: 1212 - RNA, 98 nt, synthetic construct
  misc_feature 1..98: note = Synthetic sequence or unknown origin
  source 1..98: mol_type = other RNA
gttttagtttcttaattatgaaattaattaagctactaaaataatggcaggcgaaagccttgtccagtaagtgaccaccttatgggtggtcttttttt

SEQ ID NO: 1213 - RNA, 19 nt, synthetic construct
  misc_feature 1..19: note = Synthetic sequence or unknown origin
  source 1..19: mol_type = other RNA
gttttagtttcttaattat

SEQ ID NO: 1214 - RNA, 15 nt, synthetic construct
  misc_feature 1..15: note = Synthetic sequence or unknown origin
  source 1..15: mol_type = other RNA
gttttagtttcttaa

SEQ ID NO: 1215 - RNA, 12 nt, synthetic construct
  misc_feature 1..12: note = Synthetic sequence or unknown origin
  source 1..12: mol_type = other RNA
gttttagtttct

SEQ ID NO: 1216 - RNA, 10 nt, synthetic construct
  misc_feature 1..10: note = Synthetic sequence or unknown origin
  source 1..10: mol_type = other RNA
gttttagttt

SEQ ID NO: 1217 - RNA, 19 nt, synthetic construct
  misc_feature 1..19: note = Synthetic sequence or unknown origin
  source 1..19: mol_type = other RNA
ttaattaagctactaaaat

SEQ ID NO: 1218 - RNA, 15 nt, synthetic construct
  misc_feature 1..15: note = Synthetic sequence or unknown origin
  source 1..15: mol_type = other RNA
ttaagctactaaaat

SEQ ID NO: 1219 - RNA, 12 nt, synthetic construct
  misc_feature 1..12: note = Synthetic sequence or unknown origin
  source 1..12: mol_type = other RNA
agctactaaaat

SEQ ID NO: 1220 - RNA, 10 nt, synthetic construct
  misc_feature 1..10: note = Synthetic sequence or unknown origin
  source 1..10: mol_type = other RNA
ctactaaaat

SEQ ID NO: 1221 - RNA, 30 nt, synthetic construct
  misc_feature 1..30: note = Synthetic sequence or unknown origin
  source 1..30: mol_type = other RNA
aatggcaggcgaaagccttgtccagtaagt

SEQ ID NO: 1222 - RNA, 24 nt, synthetic construct
  misc_feature 1..24: note = Synthetic sequence or unknown origin
  source 1..24: mol_type = other RNA
aatggcaggcgaaagccttgtcca

SEQ ID NO: 1223 - RNA, 26 nt, synthetic construct
  misc_feature 1..26: note = Synthetic sequence or unknown origin
  source 1..26: mol_type = other RNA
gaccaccttatgggtggtcttttttt

SEQ ID NO: 1224 - RNA, 19 nt, synthetic construct
  misc_feature 1..19: note = Synthetic sequence or unknown origin
  source 1..19: mol_type = other RNA
gaccaccttatgggtggtc

SEQ ID NO: 1225 - RNA, 19 nt, synthetic construct
  misc_feature 1..19: note = Synthetic sequence or unknown origin
  source 1..19: mol_type = other RNA
gaccaccttatgggtggtc

SEQ ID NO: 1226 - RNA, 98 nt, synthetic construct
  misc_feature 1..98: note = Synthetic sequence or unknown origin
  source 1..98: mol_type = other RNA
gttctagtttcttaattatgaaattaattaagctactagaataatggcaggcgaaagccttgtccagtaagtgaccaccttatgggtggtcttttttt

SEQ ID NO: 1227 - RNA, 19 nt, synthetic construct
  misc_feature 1..19: note = Synthetic sequence or unknown origin
  source 1..19: mol_type = other RNA
gttctagtttcttaattat

SEQ ID NO: 1228 - RNA, 15 nt, synthetic construct
  misc_feature 1..15: note = Synthetic sequence or unknown origin
  source 1..15: mol_type = other RNA
gttctagtttcttaa

SEQ ID NO: 1229 - RNA, 12 nt, synthetic construct
  misc_feature 1..12: note = Synthetic sequence or unknown origin
  source 1..12: mol_type = other RNA
gttctagtttct

SEQ ID NO: 1230 - RNA, 10 nt, synthetic construct
  misc_feature 1..10: note = Synthetic sequence or unknown origin
  source 1..10: mol_type = other RNA
gttctagttt

SEQ ID NO: 1231 - RNA, 19 nt, synthetic construct
  misc_feature 1..19: note = Synthetic sequence or unknown origin
  source 1..19: mol_type = other RNA
ttaattaagctactagaat

SEQ ID NO: 1232 - RNA, 15 nt, synthetic construct
  misc_feature 1..15: note = Synthetic sequence or unknown origin
  source 1..15: mol_type = other RNA
ttaagctactagaat

SEQ ID NO: 1233 - RNA, 12 nt, synthetic construct
  misc_feature 1..12: note = Synthetic sequence or unknown origin
  source 1..12: mol_type = other RNA
agctactagaat

SEQ ID NO: 1234 - RNA, 10 nt, synthetic construct
  misc_feature 1..10: note = Synthetic sequence or unknown origin
  source 1..10: mol_type = other RNA
ctactagaat

SEQ ID NO: 1235 - RNA, 110 nt, synthetic construct
  misc_feature 1..110: note = Synthetic sequence or unknown origin
  source 1..110: mol_type = other RNA
gttttagtttcttaattatgaaattaattaagctactaaaataatggcaggcgaaagccttgtccagtaagtgaccaccttatgggtggtctttttttgcgaactttttt

SEQ ID NO: 1236 - RNA, 24 nt, synthetic construct
  misc_feature 1..24: note = Synthetic sequence or unknown origin
  source 1..24: mol_type = other RNA
aatggcaggcgaaagccttgtcca

SEQ ID NO: 1237 - RNA, 44 nt, synthetic construct
  misc_feature 1..44: note = Synthetic sequence or unknown origin
  source 1..44: mol_type = other RNA
gtaagtgaccaccttatgggtggtctttttttgcgaactttttt

SEQ ID NO: 1238 - RNA, 34 nt, synthetic construct
  misc_feature 1..34: note = Synthetic sequence or unknown origin
  source 1..34: mol_type = other RNA
gtaagtgaccaccttatgggtggtctttttttgc

SEQ ID NO: 1239 - RNA, 38 nt, synthetic construct
  misc_feature 1..38: note = Synthetic sequence or unknown origin
  source 1..38: mol_type = other RNA
gtaagtgaccaccttatgggtggtctttttttgcgaac

SEQ ID NO: 1240 - RNA, 110 nt, synthetic construct
  misc_feature 1..110: note = Synthetic sequence or unknown origin
  source 1..110: mol_type = other RNA
gttctagtttcttaattatgaaattaattaagctactagaataatggcaggcgaaagccttgtccagtaagtgaccaccttatgggtggtctttctttgcgaactttttt

SEQ ID NO: 1241 - RNA, 44 nt, synthetic construct
  misc_feature 1..44: note = Synthetic sequence or unknown origin
  source 1..44: mol_type = other RNA
gtaagtgaccaccttatgggtggtctttctttgcgaactttttt

SEQ ID NO: 1242 - RNA, 34 nt, synthetic construct
  misc_feature 1..34: note = Synthetic sequence or unknown origin
  source 1..34: mol_type = other RNA
gtaagtgaccaccttatgggtggtctttctttgc

SEQ ID NO: 1243 - RNA, 38 nt, synthetic construct
  misc_feature 1..38: note = Synthetic sequence or unknown origin
  source 1..38: mol_type = other RNA
gtaagtgaccaccttatgggtggtctttctttgcgaac

SEQ ID NO: 1244 - RNA, 93 nt, synthetic construct
  misc_feature 1..93: note = Synthetic sequence or unknown origin
  source 1..93: mol_type = other RNA
gttatagttgaccgtgaaaacggtcaacacatatataataaggctgaaaatgccgtaagatgagggggcgatgcgttgcccccattatttttt

SEQ ID NO: 1245 - RNA, 15 nt, synthetic construct
  misc_feature 1..15: note = Synthetic sequence or unknown origin
  source 1..15: mol_type = other RNA
gttatagttgaccgt

SEQ ID NO: 1246 - RNA, 12 nt, synthetic construct
  misc_feature 1..12: note = Synthetic sequence or unknown origin
  source 1..12: mol_type = other RNA
gttatagttgac

SEQ ID NO: 1247 - RNA, 10 nt, synthetic construct
  misc_feature 1..10: note = Synthetic sequence or unknown origin
  source 1..10: mol_type = other RNA
gttatagttg

SEQ ID NO: 1248 - RNA, 20 nt, synthetic construct
  misc_feature 1..20: note = Synthetic sequence or unknown origin
  source 1..20: mol_type = other RNA
acggtcaacacatatataat

SEQ ID NO: 1249 - RNA, 17 nt, synthetic construct
  misc_feature 1..17: note = Synthetic sequence or unknown origin
  source 1..17: mol_type = other RNA
gtcaacacatatataat

SEQ ID NO: 1250 - RNA, 15 nt, synthetic construct
  misc_feature 1..15: note = Synthetic sequence or unknown origin
  source 1..15: mol_type = other RNA
caacacatatataat

SEQ ID NO: 1251 - RNA, 17 nt, synthetic construct
  misc_feature 1..17: note = Synthetic sequence or unknown origin
  source 1..17: mol_type = other RNA
aaggctgaaaatgccgt

SEQ ID NO: 1252 - RNA, 15 nt, synthetic construct
  misc_feature 1..15: note = Synthetic sequence or unknown origin
  source 1..15: mol_type = other RNA
aaggctgaaaatgcc

SEQ ID NO: 1253 - RNA, 37 nt, synthetic construct
  misc_feature 1..37: note = Synthetic sequence or unknown origin
  source 1..37: mol_type = other RNA
aagatgagggggcgatgcgttgcccccattatttttt

SEQ ID NO: 1254 - RNA, 35 nt, synthetic construct
  misc_feature 1..35: note = Synthetic sequence or unknown origin
  source 1..35: mol_type = other RNA
aagatgagggggcgatgcgttgcccccattatttt

SEQ ID NO: 1255 - RNA, 31 nt, synthetic construct
  misc_feature 1..31: note = Synthetic sequence or unknown origin
  source 1..31: mol_type = other RNA
aagatgagggggcgatgcgttgcccccatta

SEQ ID NO: 1256 - RNA, 95 nt, synthetic construct
  misc_feature 1..95: note = Synthetic sequence or unknown origin
  source 1..95: mol_type = other RNA
gttttagttctctgatgagaaatcatcaagagttctaagataaggcattatgccgtagggtatagcggtatcccaaaacactccgctcatttttt

SEQ ID NO: 1257 - RNA, 18 nt, synthetic construct
  misc_feature 1..18: note = Synthetic sequence or unknown origin
  source 1..18: mol_type = other RNA
gttttagttctctgatga

SEQ ID NO: 1258 - RNA, 15 nt, synthetic construct
  misc_feature 1..15: note = Synthetic sequence or unknown origin
  source 1..15: mol_type = other RNA
gttttagttctctga

SEQ ID NO: 1259 - RNA, 12 nt, synthetic construct
  misc_feature 1..12: note = Synthetic sequence or unknown origin
  source 1..12: mol_type = other RNA
gttttagttctc

SEQ ID NO: 1260 - RNA, 10 nt, synthetic construct
  misc_feature 1..10: note = Synthetic sequence or unknown origin
  source 1..10: mol_type = other RNA
gttttagttc

SEQ ID NO: 1261 - RNA, 19 nt, synthetic construct
  misc_feature 1..19: note = Synthetic sequence or unknown origin
  source 1..19: mol_type = other RNA
tcatcaagagttctaagat

SEQ ID NO: 1262 - RNA, 16 nt, synthetic construct
  misc_feature 1..16: note = Synthetic sequence or unknown origin
  source 1..16: mol_type = other RNA
tcaagagttctaagat

SEQ ID NO: 1263 - RNA, 13 nt, synthetic construct
  misc_feature 1..13: note = Synthetic sequence or unknown origin
  source 1..13: mol_type = other RNA
agagttctaagat

SEQ ID NO: 1264 - RNA, 10 nt, synthetic construct
  misc_feature 1..10: note = Synthetic sequence or unknown origin
  source 1..10: mol_type = other RNA
gttctaagat

SEQ ID NO: 1265 - RNA, 23 nt, synthetic construct
  misc_feature 1..23: note = Synthetic sequence or unknown origin
  source 1..23: mol_type = other RNA
aaggcattatgccgtagggtata

SEQ ID NO: 1266 - RNA, 23 nt, synthetic construct
  misc_feature 1..23: note = Synthetic sequence or unknown origin
  source 1..23: mol_type = other RNA
aaggcattatgccgtagggtata

SEQ ID NO: 1267 - RNA, 31 nt, synthetic construct
  misc_feature 1..31: note = Synthetic sequence or unknown origin
  source 1..31: mol_type = other RNA
gcggtatcccaaaacactccgctcatttttt

SEQ ID NO: 1268 - RNA, 22 nt, synthetic construct
  misc_feature 1..22: note = Synthetic sequence or unknown origin
  source 1..22: mol_type = other RNA
gcggtatcccaaaacactccgc

SEQ ID NO: 1269 - RNA, 25 nt, synthetic construct
  misc_feature 1..25: note = Synthetic sequence or unknown origin
  source 1..25: mol_type = other RNA
gcggtatcccaaaacactccgctca

SEQ ID NO: 1270 - RNA, 95 nt, synthetic construct
  misc_feature 1..95: note = Synthetic sequence or unknown origin
  source 1..95: mol_type = other RNA
gtcttagttctctgatgagaaatcatcaagagttctaagataaggcattatgccgtagggtatagcggtatcccaaaacactccgctcatttttt

SEQ ID NO: 1271 - RNA, 18 nt, synthetic construct
  misc_feature 1..18: note = Synthetic sequence or unknown origin
  source 1..18: mol_type = other RNA
gtcttagttctctgatga

SEQ ID NO: 1272 - RNA, 15 nt, synthetic construct
  misc_feature 1..15: note = Synthetic sequence or unknown origin
  source 1..15: mol_type = other RNA
gtcttagttctctga

SEQ ID NO: 1273 - RNA, 12 nt, synthetic construct
  misc_feature 1..12: note = Synthetic sequence or unknown origin
  source 1..12: mol_type = other RNA
gtcttagttctc

SEQ ID NO: 1274 - RNA, 10 nt, synthetic construct
  misc_feature 1..10: note = Synthetic sequence or unknown origin
  source 1..10: mol_type = other RNA
gtcttagttc

SEQ ID NO: 1275 - RNA, 133 nt, synthetic construct
  misc_feature 1..133: note = Synthetic sequence or unknown origin
  source 1..133: mol_type = other RNA
gttttagttctctgatgagaaatcatcaagagttctaagataaggcattatgccgtagggtatagcggtatcccaaaacactccgctcattttgattgattaaggttgtttctttaatggaacaacctttttt

SEQ ID NO: 1276 - RNA, 33 nt, synthetic construct
  misc_feature 1..33: note = Synthetic sequence or unknown origin
  source 1..33: mol_type = other RNA
gcggtatcccaaaacactccgctcattttgatt

SEQ ID NO: 1277 - RNA, 36 nt, synthetic construct
  misc_feature 1..36: note = Synthetic sequence or unknown origin
  source 1..36: mol_type = other RNA
gattaaggttgtttctttaatggaacaacctttttt

SEQ ID NO: 1278 - RNA, 36 nt, synthetic construct; identical to SEQ ID NO: 1277
  misc_feature 1..36: note = Synthetic sequence or unknown origin
  source 1..36: mol_type = other RNA

SEQ ID NO: 1279 - RNA, 30 nt, synthetic construct
  misc_feature 1..30: note = Synthetic sequence or unknown origin
  source 1..30: mol_type = other RNA
gattaaggttgtttctttaatggaacaacc

SEQ ID NO: 1280 - RNA, 133 nt, synthetic construct
  misc_feature 1..133: note = Synthetic sequence or unknown origin
  source 1..133: mol_type = other RNA
gtcttagttctctgatgagaaatcatcaagagttctaagataaggcattatgccgtagggtatagcggtatcccaaaacactccgctcattctgattgattaaggttgtttctttaatggaacaacctttttt

SEQ ID NO: 1281 - RNA, 14 nt, synthetic construct
  misc_feature 1..14: note = Synthetic sequence or unknown origin
  source 1..14: mol_type = other RNA
aaggcattatgccg

SEQ ID NO: 1282 - RNA, 13 nt, synthetic construct
  misc_feature 1..13: note = Synthetic sequence or unknown origin
  source 1..13: mol_type = other RNA
aaggcattatgcc

SEQ ID NO: 1283 - RNA, 42 nt, synthetic construct
  misc_feature 1..42: note = Synthetic sequence or unknown origin
  source 1..42: mol_type = other RNA
tagggtatagcggtatcccaaaacactccgctcattctgatt

SEQ ID NO: 1284 - RNA, 39 nt, synthetic construct
  misc_feature 1..39: note = Synthetic sequence or unknown origin
  source 1..39: mol_type = other RNA
tagggtatagcggtatcccaaaacactccgctcattctg

SEQ ID NO: 1285 - RNA, 124 nt, synthetic construct
  misc_feature 1..124: note = Synthetic sequence or unknown origin
  source 1..124: mol_type = other RNA
gttgttgttcccggttatcgaaagatatacggttacaacaataagacctccatctttttgatggtgtgtctcaggctctgatcccatctaaagttaattctttaggtgggattatccatttttt

SEQ ID NO: 1286 - RNA, 19 nt, synthetic construct
  misc_feature 1..19: note = Synthetic sequence or unknown origin
  source 1..19: mol_type = other RNA
gttgttgttcccggttatc

SEQ ID NO: 1287 - RNA, 15 nt, synthetic construct
  misc_feature 1..15: note = Synthetic sequence or unknown origin
  source 1..15: mol_type = other RNA
gttgttgttcccggt

SEQ ID NO: 1288 - RNA, 12 nt, synthetic construct
  misc_feature 1..12: note = Synthetic sequence or unknown origin
  source 1..12: mol_type = other RNA
gttgttgttccc

SEQ ID NO: 1289 - RNA, 10 nt, synthetic construct
  misc_feature 1..10: note = Synthetic sequence or unknown origin
  source 1..10: mol_type = other RNA
gttgttgttc

SEQ ID NO: 1290 - RNA, 19 nt, synthetic construct
  misc_feature 1..19: note = Synthetic sequence or unknown origin
  source 1..19: mol_type = other RNA
gatatacggttacaacaat

SEQ ID NO: 1291 - RNA, 15 nt, synthetic construct
  misc_feature 1..15: note = Synthetic sequence or unknown origin
  source 1..15: mol_type = other RNA
tacggttacaacaat

SEQ ID NO: 1292 - RNA, 12 nt, synthetic construct
  misc_feature 1..12: note = Synthetic sequence or unknown origin
  source 1..12: mol_type = other RNA
ggttacaacaat

SEQ ID NO: 1293 - RNA, 10 nt, synthetic construct
  misc_feature 1..10: note = Synthetic sequence or unknown origin
  source 1..10: mol_type = other RNA
ttacaacaat

SEQ ID NO: 1294 - RNA, 31 nt, synthetic construct
  misc_feature 1..31: note = Synthetic sequence or unknown origin
  source 1..31: mol_type = other RNA
aagacctccatctttttgatggtgtgtctca

SEQ ID NO: 1295 - RNA, 29 nt, synthetic construct
  misc_feature 1..29: note = Synthetic sequence or unknown origin
  source 1..29: mol_type = other RNA
aagacctccatctttttgatggtgtgtct

SEQ ID NO: 1296 - RNA, 51 nt, synthetic construct
  misc_feature 1..51: note = Synthetic sequence or unknown origin
  source 1..51: mol_type = other RNA
ggctctgatcccatctaaagttaattctttaggtgggattatccatttttt

SEQ ID NO: 1297 - RNA, 44 nt, synthetic construct
  misc_feature 1..44: note = Synthetic sequence or unknown origin
  source 1..44: mol_type = other RNA
ggctctgatcccatctaaagttaattctttaggtgggattatcc

SEQ ID NO: 1298 - RNA, 45 nt, synthetic construct
  misc_feature 1..45: note = Synthetic sequence or unknown origin
  source 1..45: mol_type = other RNA
ggctctgatcccatctaaagttaattctttaggtgggattatcca

SEQ ID NO: 1299 - RNA, 122 nt, synthetic construct
  misc_feature 1..122: note = Synthetic sequence or unknown origin
  source 1..122: mol_type = other RNA
gttgttgttcccggttatcgaaagataaacggttacaacaataaggtcccgccgctggcggtgtacctcaaagctctaatcccacttaaagtgaatactttaagtgggattatctatttttt

SEQ ID NO: 1300 - RNA, 19 nt, synthetic construct
  misc_feature 1..19: note = Synthetic sequence or unknown origin
  source 1..19: mol_type = other RNA
gttgttgttcccggttatc

SEQ ID NO: 1301 - RNA, 15 nt, synthetic construct
  misc_feature 1..15: note = Synthetic sequence or unknown origin
  source 1..15: mol_type = other RNA
gttgttgttcccggt

SEQ ID NO: 1302 - RNA, 12 nt, synthetic construct
  misc_feature 1..12: note = Synthetic sequence or unknown origin
  source 1..12: mol_type = other RNA
gttgttgttccc

SEQ ID NO: 1303 - RNA, 10 nt, synthetic construct
  misc_feature 1..10: note = Synthetic sequence or unknown origin
  source 1..10: mol_type = other RNA
gttgttgttc

SEQ ID NO: 1304 - RNA, 19 nt, synthetic construct
  misc_feature 1..19: note = Synthetic sequence or unknown origin
  source 1..19: mol_type = other RNA
gataaacggttacaacaat

SEQ ID NO: 1305 - RNA, 15 nt, synthetic construct
  misc_feature 1..15: note = Synthetic sequence or unknown origin
  source 1..15: mol_type = other RNA
aacggttacaacaat

SEQ ID NO: 1306 - RNA, 12 nt, synthetic construct
  misc_feature 1..12: note = Synthetic sequence or unknown origin
  source 1..12: mol_type = other RNA
ggttacaacaat

SEQ ID NO: 1307 - RNA, 10 nt, synthetic construct
  misc_feature 1..10: note = Synthetic sequence or unknown origin
  source 1..10: mol_type = other RNA
ttacaacaat

SEQ ID NO: 1308 - RNA, 34 nt, synthetic construct
  misc_feature 1..34: note = Synthetic sequence or unknown origin
  source 1..34: mol_type = other RNA
aaggtcccgccgctggcggtgtacctcaaagctc

SEQ ID NO: 1309 - RNA, 26 nt, synthetic construct
  misc_feature 1..26: note = Synthetic sequence or unknown origin
  source 1..26: mol_type = other RNA
aaggtcccgccgctggcggtgtacct

SEQ ID NO: 1310 - RNA, 46 nt, synthetic construct
  misc_feature 1..46: note = Synthetic sequence or unknown origin
  source 1..46: mol_type = other RNA
taatcccacttaaagtgaatactttaagtgggattatctatttttt

SEQ ID NO: 1311 - RNA, 36 nt, synthetic construct
  misc_feature 1..36: note = Synthetic sequence or unknown origin
  source 1..36: mol_type = other RNA
taatcccacttaaagtgaatactttaagtgggatta

SEQ ID NO: 1312 - RNA, 40 nt, synthetic construct
  misc_feature 1..40: note = Synthetic sequence or unknown origin
  source 1..40: mol_type = other RNA
taatcccacttaaagtgaatactttaagtgggattatcta

SEQ ID NO: 1313 - RNA, 148 nt, synthetic construct
  misc_feature 1..148: note = Synthetic sequence or unknown origin
  source 1..148: mol_type = other RNA
gttcctattagggaaacctcaacttaggtaacaagggcattaaagcccacaaagggatttattcccacttaaattagttttgatttgattgtaaataattaaaaatcctcaaaaagtatgagttgctcgtgctttttggggatttttt

SEQ ID NO: 1314 - RNA, 12 nt, synthetic construct
  misc_feature 1..12: note = Synthetic sequence or unknown origin
  source 1..12: mol_type = other RNA
gttcctattagg

SEQ ID NO: 1315 - RNA, 10 nt, synthetic construct
  misc_feature 1..10: note = Synthetic sequence or unknown origin
  source 1..10: mol_type = other RNA
gttcctatta

SEQ ID NO: 1316 - RNA, 16 nt, synthetic construct
  misc_feature 1..16: note = Synthetic sequence or unknown origin
  source 1..16: mol_type = other RNA
cctcaacttaggtaac

SEQ ID NO: 1317 - RNA, 14 nt, synthetic construct
  misc_feature 1..14: note = Synthetic sequence or unknown origin
  source 1..14: mol_type = other RNA
tcaacttaggtaac

SEQ ID NO: 1318 - RNA, 21 nt, synthetic construct
  misc_feature 1..21: note = Synthetic sequence or unknown origin
  source 1..21: mol_type = other RNA
aagggcattaaagcccacaaa

SEQ ID NO: 1319 - RNA, 16 nt, synthetic construct
  misc_feature 1..16: note = Synthetic sequence or unknown origin
  source 1..16: mol_type = other RNA
aagggcattaaagccc

SEQ ID NO: 1320 - RNA, 15 nt, synthetic construct
  misc_feature 1..15: note = Synthetic sequence or unknown origin
  source 1..15: mol_type = other RNA
gggatttattcccac

SEQ ID NO: 1321 - RNA, 13 nt, synthetic construct
  misc_feature 1..13: note = Synthetic sequence or unknown origin
  source 1..13: mol_type = other RNA
gggatttattccc

SEQ ID NO: 1322 - RNA, 32 nt, synthetic construct
  misc_feature 1..32: note = Synthetic sequence or unknown origin
  source 1..32: mol_type = other RNA
ttaaattagttttgatttgattgtaaataatt

SEQ ID NO: 1323 - RNA, 20 nt, synthetic construct
  misc_feature 1..20: note = Synthetic sequence or unknown origin
  source 1..20: mol_type = other RNA
ttaaattagttttgatttga

SEQ ID NO: 1324 - RNA, 48 nt, synthetic construct
  misc_feature 1..48: note = Synthetic sequence or unknown origin
  source 1..48: mol_type = other RNA
aaaaatcctcaaaaagtatgagttgctcgtgctttttggggatttttt

SEQ ID NO: 1325 - RNA, 47 nt, synthetic construct
  misc_feature 1..47: note = Synthetic sequence or unknown origin
  source 1..47: mol_type = other RNA
aaaaatcctcaaaaagtatgagttgctcgtgctttttggggattttt

SEQ ID NO: 1326 - RNA, 42 nt, synthetic construct
  misc_feature 1..42: note = Synthetic sequence or unknown origin
  source 1..42: mol_type = other RNA
aaaaatcctcaaaaagtatgagttgctcgtgctttttgggga

SEQ ID NO: 1327 - RNA, 148 nt, synthetic construct
  misc_feature 1..148: note = Synthetic sequence or unknown origin
  source 1..148: mol_type = other RNA
gttcctattagggaaacctcaacttaggtaacaagggcattaaagcccacaaagggatttattcccacttaaattagtcttgatttgattgtaaataattaaaaatcctcaagaagtatgagttgctcgtgcttcttggggatttttt

SEQ ID NO: 1328 - RNA, 32 nt, synthetic construct
  misc_feature 1..32: note = Synthetic sequence or unknown origin
  source 1..32: mol_type = other RNA
ttaaattagtcttgatttgattgtaaataatt

SEQ ID NO: 1329 - RNA, 20 nt, synthetic construct
  misc_feature 1..20: note = Synthetic sequence or unknown origin
  source 1..20: mol_type = other RNA
ttaaattagtcttgatttga

SEQ ID NO: 1330 - RNA, 48 nt, synthetic construct
  misc_feature 1..48: note = Synthetic sequence or unknown origin
  source 1..48: mol_type = other RNA
aaaaatcctcaagaagtatgagttgctcgtgcttcttggggatttttt

SEQ ID NO: 1331 - RNA, 47 nt, synthetic construct
  misc_feature 1..47: note = Synthetic sequence or unknown origin
  source 1..47: mol_type = other RNA
aaaaatcctcaagaagtatgagttgctcgtgcttcttggggattttt

SEQ ID NO: 1332 - RNA, 42 nt, synthetic construct
  misc_feature 1..42: note = Synthetic sequence or unknown origin
  source 1..42: mol_type = other RNA
aaaaatcctcaagaagtatgagttgctcgtgcttcttgggga

SEQ ID NO: 1333 - RNA, 83 nt, synthetic construct
  misc_feature 1..83: note = Synthetic sequence or unknown origin
  source 1..83: mol_type = other RNA
gttcctattagggaaacctcaacttaggtaacaagggcattaaagcccacaaagggatttattcccacttaaattagtttttt

SEQ ID NO: 1334 - RNA, 12 nt, synthetic construct
  misc_feature 1..12: note = Synthetic sequence or unknown origin
  source 1..12: mol_type = other RNA
gttcctattagg

SEQ ID NO: 1335 - RNA, 10 nt, synthetic construct
  misc_feature 1..10: note = Synthetic sequence or unknown origin
  source 1..10: mol_type = other RNA
gttcctatta

SEQ ID NO: 1336 - RNA, 16 nt, synthetic construct
  misc_feature 1..16: note = Synthetic sequence or unknown origin
  source 1..16: mol_type = other RNA
cctcaacttaggtaac

SEQ ID NO: 1337 - RNA, 14 nt, synthetic construct
  misc_feature 1..14: note = Synthetic sequence or unknown origin
  source 1..14: mol_type = other RNA
tcaacttaggtaac

SEQ ID NO: 1338 - RNA, 21 nt, synthetic construct
  misc_feature 1..21: note = Synthetic sequence or unknown origin
  source 1..21: mol_type = other RNA
aagggcattaaagcccacaaa

SEQ ID NO: 1339 - RNA, 16 nt, synthetic construct
  misc_feature 1..16: note = Synthetic sequence or unknown origin
  source 1..16: mol_type = other RNA
aagggcattaaagccc

SEQ ID NO: 1340 - RNA, 30 nt, synthetic construct
  misc_feature 1..30: note = Synthetic sequence or unknown origin
  source 1..30: mol_type = other RNA
gggatttattcccacttaaattagtttttt

SEQ ID NO: 1341 - RNA, 13 nt, synthetic construct
  misc_feature 1..13: note = Synthetic sequence or unknown origin
  source 1..13: mol_type = other RNA
gggatttattccc

SEQ ID NO: 1342 - RNA, 24 nt, synthetic construct
  misc_feature 1..24: note = Synthetic sequence or unknown origin
  source 1..24: mol_type = other RNA
gggatttattcccacttaaattag

SEQ ID NO: 1343 - RNA, 104 nt, synthetic construct
  misc_feature 1..104: note = Synthetic sequence or unknown origin
  source 1..104: mol_type = other RNA
gtttgagagccttgttagaaataacaaggcaagttcaaataaaacttttgtctaatcacttattcgcattggcgaaccgctcttccttttcggaagagtttttt

SEQ ID NO: 1344 - RNA, 17 nt, synthetic construct
  misc_feature 1..17: note = Synthetic sequence or unknown origin
  source 1..17: mol_type = other RNA
gtttgagagccttgtta

SEQ ID NO: 1345 - RNA, 15 nt, synthetic construct
  misc_feature 1..15: note = Synthetic sequence or unknown origin
  source 1..15: mol_type = other RNA
gtttgagagccttgt

SEQ ID NO: 1346 - RNA, 12 nt, synthetic construct
  misc_feature 1..12: note = Synthetic sequence or unknown origin
  source 1..12: mol_type = other RNA
gtttgagagcct

SEQ ID NO: 1347 - RNA, 10 nt, synthetic construct
  misc_feature 1..10: note = Synthetic sequence or unknown origin
  source 1..10: mol_type = other RNA
gtttgagagc

SEQ ID NO: 1348 - RNA, 19 nt, synthetic construct
  misc_feature 1..19: note = Synthetic sequence or unknown origin
  source 1..19: mol_type = other RNA
taacaaggcaagttcaaat

SEQ ID NO: 1349 - RNA, 17 nt, synthetic construct
  misc_feature 1..17: note = Synthetic sequence or unknown origin
  source 1..17: mol_type = other RNA
acaaggcaagttcaaat

SEQ ID NO: 1350 - RNA, 14 nt, synthetic construct
  misc_feature 1..14: note = Synthetic sequence or unknown origin
  source 1..14: mol_type = other RNA
aggcaagttcaaat

SEQ ID NO: 1351 - RNA, 12 nt, synthetic construct
  misc_feature 1..12: note = Synthetic sequence or unknown origin
  source 1..12: mol_type = other RNA
gcaagttcaaat

SEQ ID NO: 1352 - RNA, 38 nt, synthetic construct
  misc_feature 1..38: note = Synthetic sequence or unknown origin
  source 1..38: mol_type = other RNA
aaaacttttgtctaatcacttattcgcattggcgaacc

SEQ ID NO: 1353 - RNA, 36 nt, synthetic construct
  misc_feature 1..36: note = Synthetic sequence or unknown origin
  source 1..36: mol_type = other RNA
aaaacttttgtctaatcacttattcgcattggcgaa

SEQ ID NO: 1354 - RNA, 26 nt, synthetic construct
  misc_feature 1..26: note = Synthetic sequence or unknown origin
  source 1..26: mol_type = other RNA
gctcttccttttcggaagagtttttt

SEQ ID NO: 1355 - RNA, 21 nt, synthetic construct
  misc_feature 1..21: note = Synthetic sequence or unknown origin
  source 1..21: mol_type = other RNA
gctcttccttttcggaagagt

SEQ ID NO: 1356 - RNA, 20 nt, synthetic construct
  misc_feature 1..20: note = Synthetic sequence or unknown origin
  source 1..20: mol_type = other RNA
gctcttccttttcggaagag

SEQ ID NO: 1357 - RNA, 104 nt, synthetic construct
  misc_feature 1..104: note = Synthetic sequence or unknown origin
  source 1..104: mol_type = other RNA
gtttgagagccttgttagaaataacaaggcaagttcaaataaaacttctgtctaatcacttattcgcattggcgaaccgctcttccttctcggaagagtttttt

SEQ ID NO: 1358 - RNA, 38 nt, synthetic construct
  misc_feature 1..38: note = Synthetic sequence or unknown origin
  source 1..38: mol_type = other RNA
aaaacttctgtctaatcacttattcgcattggcgaacc

SEQ ID NO: 1359 - RNA, 36 nt, synthetic construct
  misc_feature 1..36: note = Synthetic sequence or unknown origin
  source 1..36: mol_type = other RNA
aaaacttctgtctaatcacttattcgcattggcgaa

SEQ ID NO: 1360 - RNA, 26 nt, synthetic construct
  misc_feature 1..26: note = Synthetic sequence or unknown origin
  source 1..26: mol_type = other RNA
gctcttccttctcggaagagtttttt

SEQ ID NO: 1361 - RNA, 21 nt, synthetic construct
  misc_feature 1..21: note = Synthetic sequence or unknown origin
  source 1..21: mol_type = other RNA
gctcttccttctcggaagagt

SEQ ID NO: 1362 - RNA, 20 nt, synthetic construct
  misc_feature 1..20: note = Synthetic sequence or unknown origin
  source 1..20: mol_type = other RNA
gctcttccttctcggaagag

SEQ ID NO: 1363 - RNA, 99 nt, synthetic construct
  misc_feature 1..99: note = Synthetic sequence or unknown origin
  source 1..99: mol_type = other RNA
gttgtggtttgatgtaggagaaatcctacatcttatcacaataaggccataatggccgaagggtaaaacctatactcccgcttcggtgggagttttttt

SEQ ID NO: 1364 - RNA, 19 nt, synthetic construct
  misc_feature 1..19: note = Synthetic sequence or unknown origin
  source 1..19: mol_type = other RNA
gttgtggtttgatgtagga

SEQ ID NO: 1365 - RNA, 15 nt, synthetic construct
  misc_feature 1..15: note = Synthetic sequence or unknown origin
  source 1..15: mol_type = other RNA
gttgtggtttgatgt

SEQ ID NO: 1366 - RNA, 12 nt, synthetic construct
  misc_feature 1..12: note = Synthetic sequence or unknown origin
  source 1..12: mol_type = other RNA
gttgtggtttga

SEQ ID NO: 1367 - RNA, 10 nt, synthetic construct
  misc_feature 1..10: note = Synthetic sequence or unknown origin
  source 1..10: mol_type = other RNA
gttgtggttt

SEQ ID NO: 1368 - RNA, 19 nt, synthetic construct
  misc_feature 1..19: note = Synthetic sequence or unknown origin
  source 1..19: mol_type = other RNA
tcctacatcttatcacaat

SEQ ID NO: 1369 - RNA, 15 nt, synthetic construct
  misc_feature 1..15: note = Synthetic sequence or unknown origin
  source 1..15: mol_type = other RNA
acatcttatcacaat

SEQ ID NO: 1370 - RNA, 12 nt, synthetic construct
  misc_feature 1..12: note = Synthetic sequence or unknown origin
  source 1..12: mol_type = other RNA
tcttatcacaat

SEQ ID NO: 1371 - RNA, 10 nt, synthetic construct
  misc_feature 1..10: note = Synthetic sequence or unknown origin
  source 1..10: mol_type = other RNA
ttatcacaat

SEQ ID NO: 1372 - RNA, 17 nt, synthetic construct
  misc_feature 1..17: note = Synthetic sequence or unknown origin
  source 1..17: mol_type = other RNA
aaggccataatggccga

SEQ ID NO: 1373 - RNA, 15 nt, synthetic construct
  misc_feature 1..15: note = Synthetic sequence or unknown origin
  source 1..15: mol_type = other RNA
aaggccataatggcc

SEQ ID NO: 1374 - RNA, 14 nt, synthetic construct
  misc_feature 1..14: note = Synthetic sequence or unknown origin
  source 1..14: mol_type = other RNA
agggtaaaacctat

SEQ ID NO: 1375 - RNA, 12 nt, synthetic construct
  misc_feature 1..12: note = Synthetic sequence or unknown origin
  source 1..12: mol_type = other RNA
agggtaaaacct

SEQ ID NO: 1376 - RNA, 26 nt, synthetic construct
  misc_feature 1..26: note = Synthetic sequence or unknown origin
  source 1..26: mol_type = other RNA
actcccgcttcggtgggagttttttt

SEQ ID NO: 1377 - RNA, 20 nt, synthetic construct
  misc_feature 1..20: note = Synthetic sequence or unknown origin
  source 1..20: mol_type = other RNA
actcccgcttcggtgggagt

SEQ ID NO: 1378 - RNA, 19 nt, synthetic construct
  misc_feature 1..19: note = Synthetic sequence or unknown origin
  source 1..19: mol_type = other RNA
actcccgcttcggtgggag

SEQ ID NO: 1379 - RNA, 100 nt, synthetic construct
  misc_feature 1..100: note = Synthetic sequence or unknown origin
  source 1..100: mol_type = other RNA
gttgtgatttgatgtagaagaaaatctacatcttatcacaataaggctatatgccgaaggattttatcctatagtcccgcgtactccgtgggactttttt

SEQ ID NO: 1380 - RNA, 19 nt, synthetic construct
  misc_feature 1..19: note = Synthetic sequence or unknown origin
  source 1..19: mol_type = other RNA
gttgtgatttgatgtagaa

SEQ ID NO: 1381 - RNA, 15 nt, synthetic construct
  misc_feature 1..15: note = Synthetic sequence or unknown origin
  source 1..15: mol_type = other RNA
gttgtgatttgatgt

SEQ ID NO: 1382 - RNA, 12 nt, synthetic construct
  misc_feature 1..12: note = Synthetic sequence or unknown origin
  source 1..12: mol_type = other RNA
gttgtgatttga

SEQ ID NO: 1383 - RNA, 10 nt, synthetic construct
  misc_feature 1..10: note = Synthetic sequence or unknown origin
  source 1..10: mol_type = other RNA
gttgtgattt

SEQ ID NO: 1384 - RNA, 19 nt, synthetic construct
  misc_feature 1..19: note = Synthetic sequence or unknown origin
  source 1..19: mol_type = other RNA
atctacatcttatcacaat

SEQ ID NO: 1385 - RNA, 15 nt, synthetic construct
  misc_feature 1..15: note = Synthetic sequence or unknown origin
  source 1..15: mol_type = other RNA
acatcttatcacaat

SEQ ID NO: 1386 - RNA, 12 nt, synthetic construct
  misc_feature 1..12: note = Synthetic sequence or unknown origin
  source 1..12: mol_type = other RNA
tcttatcacaat

SEQ ID NO: 1387 - RNA, 10 nt, synthetic construct
  misc_feature 1..10: note = Synthetic sequence or unknown origin
  source 1..10: mol_type = other RNA
ttatcacaat

SEQ ID NO: 1388 - RNA, 15 nt, synthetic construct
  misc_feature 1..15: note = Synthetic sequence or unknown origin
  source 1..15: mol_type = other RNA
aaggctatatgccga

SEQ ID NO: 1389 - RNA, 13 nt, synthetic construct
  misc_feature 1..13: note = Synthetic sequence or unknown origin
  source 1..13: mol_type = other RNA
aaggctatatgcc

SEQ ID NO: 1390 - RNA, 15 nt, synthetic construct
  misc_feature 1..15: note = Synthetic sequence or unknown origin
  source 1..15: mol_type = other RNA
aggattttatcctat

SEQ ID NO: 1391 - RNA, 13 nt, synthetic construct
  misc_feature 1..13: note = Synthetic sequence or unknown origin
  source 1..13: mol_type = other RNA
aggattttatcct

SEQ ID NO: 1392 - RNA, 28 nt, synthetic construct
  misc_feature 1..28: note = Synthetic sequence or unknown origin
  source 1..28: mol_type = other RNA
agtcccgcgtactccgtgggactttttt

SEQ ID NO: 1393 - RNA, 23 nt, synthetic construct
  misc_feature 1..23: note = Synthetic sequence or unknown origin
  source 1..23: mol_type = other RNA
agtcccgcgtactccgtgggact

SEQ ID NO: 1394 - RNA, 22 nt, synthetic construct
  misc_feature 1..22: note = Synthetic sequence or unknown origin
  source 1..22: mol_type = other RNA
agtcccgcgtactccgtgggac

SEQ ID NO: 1395 - RNA, 100 nt, synthetic construct
  misc_feature 1..100: note = Synthetic sequence or unknown origin
  source 1..100: mol_type = other RNA
gttgtgatttgatgtagaagaaaatctacatcttatcacaataaggctatatgccgaaggattctatcctatagtcccgcgtactccgtgggactttttt

SEQ ID NO: 1396 - RNA, 15 nt, synthetic construct
  misc_feature 1..15: note = Synthetic sequence or unknown origin
  source 1..15: mol_type = other RNA
aggattctatcctat

SEQ ID NO: 1397 - RNA, 13 nt, synthetic construct
  misc_feature 1..13: note = Synthetic sequence or unknown origin
  source 1..13: mol_type = other RNA
aggattctatcct

SEQ ID NO: 1398 - RNA, 102 nt, synthetic construct
  misc_feature 1..102: note = Synthetic sequence or unknown origin
  source 1..102: mol_type = other RNA
gttgtggtttgatgtagaagaaattctacatcttatcacaataaggctatatgccgaaggatttatatcctatgtgccctcttcggagggcattattttttt

SEQ ID NO: 1399 - RNA, 19 nt, synthetic construct
  misc_feature 1..19: note = Synthetic sequence or unknown origin
  source 1..19: mol_type = other RNA
gttgtggtttgatgtagaa

SEQ ID NO: 1400 - RNA, 15 nt, synthetic construct
  misc_feature 1..15: note = Synthetic sequence or unknown origin
  source 1..15: mol_type = other RNA
gttgtggtttgatgt

SEQ ID NO: 1401 - RNA, 12 nt, synthetic construct
  misc_feature 1..12: note = Synthetic sequence or unknown origin
  source 1..12: mol_type = other RNA
gttgtggtttga

SEQ ID NO: 1402 - RNA, 10 nt, synthetic construct
  misc_feature 1..10: note = Synthetic sequence or unknown origin
  source 1..10: mol_type = other RNA
gttgtggttt

SEQ ID NO: 1403 - RNA, 19 nt, synthetic construct
  misc_feature 1..19: note = Synthetic sequence or unknown origin
  source 1..19: mol_type = other RNA
ttctacatcttatcacaat

SEQ ID NO: 1404 - RNA, 15 nt, synthetic construct
  misc_feature 1..15: note = Synthetic sequence or unknown origin
  source 1..15: mol_type = other RNA
acatcttatcacaat

SEQ ID NO: 1405 - RNA, 12 nt, synthetic construct
  misc_feature 1..12: note = Synthetic sequence or unknown origin
  source 1..12: mol_type = other RNA
tcttatcacaat

SEQ ID NO: 1406 - RNA, 10 nt, synthetic construct
  misc_feature 1..10: note = Synthetic sequence or unknown origin
  source 1..10: mol_type = other RNA
ttatcacaat

SEQ ID NO: 1407 - RNA, 15 nt, synthetic construct
  misc_feature 1..15: note = Synthetic sequence or unknown origin
  source 1..15: mol_type = other RNA
aaggctatatgccga

SEQ ID NO: 1408 - RNA, 13 nt, synthetic construct
  misc_feature 1..13: note = Synthetic sequence or unknown origin
  source 1..13: mol_type = other RNA
aaggctatatgcc

SEQ ID NO: 1409 - RNA, 16 nt, synthetic construct
  misc_feature 1..16: note = Synthetic sequence or unknown origin
  source 1..16: mol_type = other RNA
aggatttatatcctat

SEQ ID NO: 1410 - RNA, 14 nt, synthetic construct
  misc_feature 1..14: note = Synthetic sequence or unknown origin
  source 1..14: mol_type = other RNA
aggatttatatcct

SEQ ID NO: 1411 - RNA, 29 nt, synthetic construct
  misc_feature 1..29: note = Synthetic sequence or unknown origin
  source 1..29: mol_type = other RNA
gtgccctcttcggagggcattattttttt

SEQ ID NO: 1412 - RNA, 20 nt, synthetic construct
  misc_feature 1..20: note = Synthetic sequence or unknown origin
  source 1..20: mol_type = other RNA
gtgccctcttcggagggcat

SEQ ID NO: 1413 - RNA, 22 nt, synthetic construct
  misc_feature 1..22: note = Synthetic sequence or unknown origin
  source 1..22: mol_type = other RNA
gtgccctcttcggagggcatta

SEQ ID NO: 1414 - RNA, 110 nt, synthetic construct
  misc_feature 1..110: note = Synthetic sequence or unknown origin
  source 1..110: mol_type = other RNA
gttttaggtctcggacagaaatgtccgaggattctaagataaagctttatgctgtggggttgcgtatccccttatcgaacgtactagacgagctccggctcgtctttttt

SEQ ID NO: 1415 - RNA, 17 nt, synthetic construct
  misc_feature 1..17: note = Synthetic sequence or unknown origin
  source 1..17: mol_type = other RNA
gttttaggtctcggaca

SEQ ID NO: 1416 - RNA, 15 nt, synthetic construct
  misc_feature 1..15: note = Synthetic sequence or unknown origin
  source 1..15: mol_type = other RNA
gttttaggtctcgga

SEQ ID NO: 1417 - RNA, 12 nt, synthetic construct
  misc_feature 1..12: note = Synthetic sequence or unknown origin
  source 1..12: mol_type = other RNA
gttttaggtctc

SEQ ID NO: 1418 - RNA, 10 nt, synthetic construct
  misc_feature 1..10: note = Synthetic sequence or unknown origin
  source 1..10: mol_type = other RNA
gttttaggtc

SEQ ID NO: 1419 - RNA, 19 nt, synthetic construct
  misc_feature 1..19: note = Synthetic sequence or unknown origin
  source 1..19: mol_type = other RNA
tgtccgaggattctaagat

SEQ ID NO: 1420 - RNA, 17 nt, synthetic construct
  misc_feature 1..17: note = Synthetic sequence or unknown origin
  source 1..17: mol_type = other RNA
tccgaggattctaagat

SEQ ID NO: 1421 - RNA, 14 nt, synthetic construct
  misc_feature 1..14: note = Synthetic sequence or unknown origin
  source 1..14: mol_type = other RNA
gaggattctaagat

SEQ ID NO: 1422 - RNA, 12 nt, synthetic construct
  misc_feature 1..12: note = Synthetic sequence or unknown origin
  source 1..12: mol_type = other RNA
ggattctaagat

SEQ ID NO: 1423 - RNA, 15 nt, synthetic construct
  misc_feature 1..15: note = Synthetic sequence or unknown origin
  source 1..15: mol_type = other RNA
aaagctttatgctgt

SEQ ID NO: 1424 - RNA, 13 nt, synthetic construct
  misc_feature 1..13: note = Synthetic sequence or unknown origin
  source 1..13: mol_type = other RNA
aaagctttatgct

SEQ ID NO: 1425 - RNA, 30 nt, synthetic construct
  misc_feature 1..30: note = Synthetic sequence or unknown origin
  source 1..30: mol_type = other RNA
ggggttgcgtatccccttatcgaacgtact

SEQ ID NO: 1426 - RNA, 16 nt, synthetic construct
  misc_feature 1..16: note = Synthetic sequence or unknown origin
  source 1..16: mol_type = other RNA
ggggttgcgtatcccc

SEQ ID NO: 1427 - RNA, 25 nt, synthetic construct
  misc_feature 1..25: note = Synthetic sequence or unknown origin
  source 1..25: mol_type = other RNA
agacgagctccggctcgtctttttt

SEQ ID NO: 1428 - RNA, 20 nt, synthetic construct
  misc_feature 1..20: note = Synthetic sequence or unknown origin
  source 1..20: mol_type = other RNA
agacgagctccggctcgtct

SEQ ID NO: 1429 - RNA, 19 nt, synthetic construct
  misc_feature 1..19: note = Synthetic sequence or unknown origin
  source 1..19: mol_type = other RNA
agacgagctccggctcgtc

SEQ ID NO: 1430 - RNA, 110 nt, synthetic construct
  misc_feature 1..110: note = Synthetic sequence or unknown origin
  source 1..110: mol_type = other RNA
gtcttaggtctcggacagaaatgtccgaggattctaagataaagctttatgctgtggggttgcgtatccccttatcgaacgtactagacgagctccggctcgtctttttt

SEQ ID NO: 1431 - RNA, 17 nt, synthetic construct
  misc_feature 1..17: note = Synthetic sequence or unknown origin
  source 1..17: mol_type = other RNA
gtcttaggtctcggaca

SEQ ID NO: 1432 - RNA, 15 nt, synthetic construct
  misc_feature 1..15: note = Synthetic sequence or unknown origin
  source 1..15: mol_type = other RNA
gtcttaggtctcgga

SEQ ID NO: 1433 - RNA, 12 nt, synthetic construct
  misc_feature 1..12: note = Synthetic sequence or unknown origin
  source 1..12: mol_type = other RNA
gtcttaggtctc

SEQ ID NO: 1434 - RNA, 10 nt, synthetic construct
  misc_feature 1..10: note = Synthetic sequence or unknown origin
  source 1..10: mol_type = other RNA
gtcttaggtc

SEQ ID NO: 1435 - RNA, 82 nt, synthetic construct
  misc_feature 1..82: note = Synthetic sequence or unknown origin
  source 1..82: mol_type = other RNA
gttttaggtctcggacagaaatgtccgaggattctaagataaagctttatgctgtggggttgcgtatccccttatctttttt

SEQ ID NO: 1436 - RNA, 27 nt, synthetic construct
  misc_feature 1..27: note = Synthetic sequence or unknown origin
  source 1..27: mol_type = other RNA
ggggttgcgtatccccttatctttttt

SEQ ID NO: 1437 - RNA, 21 nt, synthetic construct
  misc_feature 1..21: note = Synthetic sequence or unknown origin
  source 1..21: mol_type = other RNA
ggggttgcgtatccccttatc

SEQ ID NO: 1438 - RNA, 98 nt, synthetic construct
  misc_feature 1..98: note = Synthetic sequence or unknown origin
  source 1..98: mol_type = other RNA
gttgtgaaaagacaccgaaagagccgtcttttcacaacaaggctatatgccgcagtcgaaatgactctccccgcacgtacgccgtgtggggatttttt

SEQ ID NO: 1439 - RNA, 16 nt, synthetic construct
  misc_feature 1..16: note = Synthetic sequence or unknown origin
  source 1..16: mol_type = other RNA
gttgtgaaaagacacc

SEQ ID NO: 1440 - RNA, 15 nt, synthetic construct
  misc_feature 1..15: note = Synthetic sequence or unknown origin
  source 1..15: mol_type = other RNA
gttgtgaaaagacac

SEQ ID NO: 1441 - RNA, 12 nt, synthetic construct
  misc_feature 1..12: note = Synthetic sequence or unknown origin
  source 1..12: mol_type = other RNA
gttgtgaaaaga

SEQ ID NO: 1442 - RNA, 10 nt, synthetic construct
  misc_feature 1..10: note = Synthetic sequence or unknown origin
  source 1..10: mol_type = other RNA
gttgtgaaaa

SEQ ID NO: 1443 - RNA, 18 nt, synthetic construct
  misc_feature 1..18: note = Synthetic sequence or unknown origin
  source 1..18: mol_type = other RNA
gagccgtcttttcacaac

SEQ ID NO: 1444 - RNA, 18 nt, synthetic construct
  misc_feature 1..18: note = Synthetic sequence or unknown origin
  source 1..18: mol_type = other RNA
gagccgtcttttcacaac

SEQ ID NO: 1445 - RNA, 12 nt, synthetic construct
  misc_feature 1..12: note = Synthetic sequence or unknown origin
  source 1..12: mol_type = other RNA
tcttttcacaac

SEQ ID NO: 1446 - RNA, 10 nt, synthetic construct
  misc_feature 1..10: note = Synthetic sequence or unknown origin
  source 1..10: mol_type = other RNA
ttttcacaac

SEQ ID NO: 1447 - RNA, 15 nt, synthetic construct
  misc_feature 1..15: note = Synthetic sequence or unknown origin
  source 1..15: mol_type = other RNA
aaggctatatgccgc

SEQ ID NO: 1448 - RNA, 13 nt, synthetic construct
  misc_feature 1..13: note = Synthetic sequence or unknown origin
  source 1..13: mol_type = other RNA
aaggctatatgcc

SEQ ID NO: 1449 - RNA, 14 nt, synthetic construct
  misc_feature 1..14: note = Synthetic sequence or unknown origin
  source 1..14: mol_type = other RNA
agtcgaaatgactc

SEQ ID NO: 1450 - RNA, 13 nt, synthetic construct
  misc_feature 1..13: note = Synthetic sequence or unknown origin
  source 1..13: mol_type = other RNA
agtcgaaatgact

SEQ ID NO: 1451 - RNA, 31 nt, synthetic construct
  misc_feature 1..31: note = Synthetic sequence or unknown origin
  source 1..31: mol_type = other RNA
tccccgcacgtacgccgtgtggggatttttt

SEQ ID NO: 1452 - RNA, 25 nt, synthetic construct
  misc_feature 1..25: note = Synthetic sequence or unknown origin
  source 1..25: mol_type = other RNA
tccccgcacgtacgccgtgtgggga

SEQ ID NO: 1453 - RNA, 25 nt, synthetic construct
  misc_feature 1..25: note = Synthetic sequence or unknown origin
  source 1..25: mol_type = other RNA
tccccgcacgtacgccgtgtgggga

SEQ ID NO: 1454 - RNA, 98 nt, synthetic construct
  misc_feature 1..98: note = Synthetic sequence or unknown origin
  source 1..98: mol_type = other RNA
gttgtgagaagacaccgaaagagccgtcttctcacaacaaggctatatgccgcagtcgaaatgactctccccgcacgtacgccgtgtggggatttttt

SEQ ID NO: 1455 - RNA, 16 nt, synthetic construct
  misc_feature 1..16: note = Synthetic sequence or unknown origin
  source 1..16: mol_type = other RNA
gttgtgagaagacacc

SEQ ID NO: 1456 - RNA, 15 nt, synthetic construct
  misc_feature 1..15: note = Synthetic sequence or unknown origin
  source 1..15: mol_type = other RNA
gttgtgagaagacac

SEQ ID NO: 1457 - RNA, 12 nt, synthetic construct
  misc_feature 1..12: note = Synthetic sequence or unknown origin
  source 1..12: mol_type = other RNA
gttgtgagaaga

SEQ ID NO: 1458 - RNA, 10 nt, synthetic construct
  misc_feature 1..10: note = Synthetic sequence or unknown origin
  source 1..10: mol_type = other RNA
gttgtgagaa

SEQ ID NO: 1459 - RNA, 18 nt, synthetic construct
  misc_feature 1..18: note = Synthetic sequence or unknown origin
  source 1..18: mol_type = other RNA
gagccgtcttctcacaac

SEQ ID NO: 1460 - RNA, 18 nt, synthetic construct
  misc_feature 1..18: note = Synthetic sequence or unknown origin
  source 1..18: mol_type = other RNA
gagccgtcttctcacaac

SEQ ID NO: 1461 - RNA, 12 nt, synthetic construct
  misc_feature 1..12: note = Synthetic sequence or unknown origin
  source 1..12: mol_type = other RNA
tcttctcacaac

SEQ ID NO: 1462 - RNA, 10 nt, synthetic construct
  misc_feature 1..10: note = Synthetic sequence or unknown origin
  source 1..10: mol_type = other RNA
ttctcacaac

SEQ ID NO: 1463 - RNA, 116 nt, synthetic construct
  misc_feature 1..116: note = Synthetic sequence or unknown origin
  source 1..116: mol_type = other RNA
gttttagatttatgttgaaaagcataaatgagttaaaataaggtaaaaccttaaatgccaatttaatattggttttgcttaggcaagtaaagtcttagttatctaaggcttttttt

SEQ ID NO: 1464 - RNA, 16 nt, synthetic construct
  misc_feature 1..16: note = Synthetic sequence or unknown origin
  source 1..16: mol_type = other RNA
gttttagatttatgtt

SEQ ID NO: 1465 - RNA, 15 nt, synthetic construct
  misc_feature 1..15: note = Synthetic sequence or unknown origin
  source 1..15: mol_type = other RNA
gttttagatttatgt

SEQ ID NO: 1466 - RNA, 12 nt, synthetic construct
  misc_feature 1..12: note = Synthetic sequence or unknown origin
  source 1..12: mol_type = other RNA
gttttagattta

SEQ ID NO: 1467 - RNA, 10 nt, synthetic construct
  misc_feature 1..10: note = Synthetic sequence or unknown origin
  source 1..10: mol_type = other RNA
gttttagatt

SEQ ID NO: 1468 - RNA, 19 nt, synthetic construct
  misc_feature 1..19: note = Synthetic sequence or unknown origin
  source 1..19: mol_type = other RNA
agcataaatgagttaaaat

SEQ ID NO: 1469 - RNA, 19 nt, synthetic construct
  misc_feature 1..19: note = Synthetic sequence or unknown origin
  source 1..19: mol_type = other RNA
agcataaatgagttaaaat

SEQ ID NO: 1470 - RNA, 15 nt, synthetic construct
  misc_feature 1..15: note = Synthetic sequence or unknown origin
  source 1..15: mol_type = other RNA
taaatgagttaaaat

SEQ ID NO: 1471 - RNA, 13 nt, synthetic construct
  misc_feature 1..13: note = Synthetic sequence or unknown origin
  source 1..13: mol_type = other RNA
aatgagttaaaat

SEQ ID NO: 1472 - RNA, 49 nt, synthetic construct
  misc_feature 1..49: note = Synthetic sequence or unknown origin
  source 1..49: mol_type = other RNA
aaggtaaaaccttaaatgccaatttaatattggttttgcttaggcaagt

SEQ ID NO: 1473 - RNA, 41 nt, synthetic construct
  misc_feature 1..41: note = Synthetic sequence or unknown origin
  source 1..41: mol_type = other RNA
aaggtaaaaccttaaatgccaatttaatattggttttgctt

SEQ ID NO: 1474 - RNA, 28 nt, synthetic construct
  misc_feature 1..28: note = Synthetic sequence or unknown origin
  source 1..28: mol_type = other RNA
aaagtcttagttatctaaggcttttttt

SEQ ID NO: 1475 - RNA, 24 nt, synthetic construct
  misc_feature 1..24: note = Synthetic sequence or unknown origin
  source 1..24: mol_type = other RNA
aaagtcttagttatctaaggcttt

SEQ ID NO: 1476 - RNA, 21 nt, synthetic construct
  misc_feature 1..21: note = Synthetic sequence or unknown origin
  source 1..21: mol_type = other RNA
aaagtcttagttatctaaggc

SEQ ID NO: 1477 - RNA, 116 nt, synthetic construct
  misc_feature 1..116: note = Synthetic sequence or unknown origin
  source 1..116: mol_type = other RNA
gttctagatttatgttgaaaagcataaatgagttagaataaggtagaaccttaaatgccaatttaatattggttctgcttaggcaagtaaagtcttagttatctaaggcttttttt

SEQ ID NO: 1478 - RNA, 16 nt, synthetic construct
  misc_feature 1..16: note = Synthetic sequence or unknown origin
  source 1..16: mol_type = other RNA
gttctagatttatgtt

SEQ ID NO: 1479 - RNA, 15 nt, synthetic construct
  misc_feature 1..15: note = Synthetic sequence or unknown origin
  source 1..15: mol_type = other RNA
gttctagatttatgt

SEQ ID NO: 1480 - RNA, 12 nt, synthetic construct
  misc_feature 1..12: note = Synthetic sequence or unknown origin
  source 1..12: mol_type = other RNA
gttctagattta

SEQ ID NO: 1481 - RNA, 10 nt, synthetic construct
  misc_feature 1..10: note = Synthetic sequence or unknown origin
  source 1..10: mol_type = other RNA
gttctagatt

SEQ ID NO: 1482 - RNA, 19 nt, synthetic construct
  misc_feature 1..19: note = Synthetic sequence or unknown origin
  source 1..19: mol_type = other RNA
agcataaatgagttagaat

SEQ ID NO: 1483 - RNA, 19 nt, synthetic construct
  misc_feature 1..19: note = Synthetic sequence or unknown origin
  source 1..19: mol_type = other RNA
agcataaatgagttagaat

SEQ ID NO: 1484 - RNA, 15 nt, synthetic construct
  misc_feature 1..15: note = Synthetic sequence or unknown origin
  source 1..15: mol_type = other RNA
taaatgagttagaat

SEQ ID NO: 1485 - RNA, 13 nt, synthetic construct
  misc_feature 1..13: note = Synthetic sequence or unknown origin
  source 1..13: mol_type = other RNA
aatgagttagaat

SEQ ID NO: 1486 - RNA, 49 nt, synthetic construct
  misc_feature 1..49: note = Synthetic sequence or unknown origin
  source 1..49: mol_type = other RNA
aaggtagaaccttaaatgccaatttaatattggttctgcttaggcaagt

SEQ ID NO: 1487 - RNA, 41 nt, synthetic construct
  misc_feature 1..41: note = Synthetic sequence or unknown origin
  source 1..41: mol_type = other RNA
aaggtagaaccttaaatgccaatttaatattggttctgctt

SEQ ID NO: 1488 - RNA, 28 nt, synthetic construct
  misc_feature 1..28: note = Synthetic sequence or unknown origin
  source 1..28: mol_type = other RNA
aaagtcttagttatctaaggcttttttt

SEQ ID NO: 1489 - RNA, 24 nt, synthetic construct
  misc_feature 1..24: note = Synthetic sequence or unknown origin
  source 1..24: mol_type = other RNA
aaagtcttagttatctaaggcttt

SEQ ID NO: 1490 - RNA, 21 nt, synthetic construct
  misc_feature 1..21: note = Synthetic sequence or unknown origin
  source 1..21: mol_type = other RNA
aaagtcttagttatctaaggc

SEQ ID NO: 1491 - RNA, 123 nt, synthetic construct
  misc_feature 1..123: note = Synthetic sequence or unknown origin
  source 1..123: mol_type = other RNA
gttttagatttatgttgaaaagcataaatgagttaaaataaggtaaaaccttaaatgccaatttaatattggttttgcttaggcaagtaaagtcttagttatctaaggctttttttatttttt

SEQ ID NO: 1492 - RNA, 45 nt, synthetic construct
  misc_feature 1..45: note = Synthetic sequence or unknown origin
  source 1..45: mol_type = other RNA
aaggtaaaaccttaaatgccaatttaatattggttttgcttaggc

SEQ ID NO: 1493 - RNA, 39 nt, synthetic construct
  misc_feature 1..39: note = Synthetic sequence or unknown origin
  source 1..39: mol_type = other RNA
aagtaaagtcttagttatctaaggctttttttatttttt

SEQ ID NO: 1494 - RNA, 32 nt, synthetic construct
  misc_feature 1..32: note = Synthetic sequence or unknown origin
  source 1..32: mol_type = other RNA
aagtaaagtcttagttatctaaggcttttttt

SEQ ID NO: 1495 - RNA, 33 nt, synthetic construct
  misc_feature 1..33: note = Synthetic sequence or unknown origin
  source 1..33: mol_type = other RNA
aagtaaagtcttagttatctaaggcttttttta

SEQ ID NO: 1496 - RNA, 130 nt, synthetic construct
  misc_feature 1..130: note = Synthetic sequence or unknown origin
  source 1..130: mol_type = other RNA
gttttagaagtatgttattgaaaaatagcataatgagttaaaataaggtttttaacctataatgccaattcatttggtttcgcttaggcgaaaaatgagagttctaattatttaggacttttattttttt

SEQ ID NO: 1497 - RNA, 19 nt, synthetic construct
  misc_feature 1..19: note = Synthetic sequence or unknown origin
  source 1..19: mol_type = other RNA
gttttagaagtatgttatt

SEQ ID NO: 1498 - RNA, 15 nt, synthetic construct
  misc_feature 1..15: note = Synthetic sequence or unknown origin
  source 1..15: mol_type = other RNA
gttttagaagtatgt

SEQ ID NO: 1499 - RNA, 12 nt, synthetic construct
  misc_feature 1..12: note = Synthetic sequence or unknown origin
  source 1..12: mol_type = other RNA
gttttagaagta

SEQ ID NO: 1500 - RNA, 10 nt, synthetic construct
  misc_feature 1..10: note = Synthetic sequence or unknown origin
  source 1..10: mol_type = other RNA
gttttagaag

SEQ ID NO: 1501 - RNA, 21 nt, synthetic construct
  misc_feature 1..21: note = Synthetic sequence or unknown origin
  source 1..21: mol_type = other RNA
aatagcataatgagttaaaat

SEQ ID NO: 1502 - RNA, 17 nt, synthetic construct
  misc_feature 1..17: note = Synthetic sequence or unknown origin
  source 1..17: mol_type = other RNA
gcataatgagttaaaat

SEQ ID NO: 1503 - RNA, 14 nt, synthetic construct
  misc_feature 1..14: note = Synthetic sequence or unknown origin
  source 1..14: mol_type = other RNA
taatgagttaaaat

SEQ ID NO: 1504 - RNA, 12 nt, synthetic construct
  misc_feature 1..12: note = Synthetic sequence or unknown origin
  source 1..12: mol_type = other RNA
atgagttaaaat

SEQ ID NO: 1505 - RNA, 19 nt, synthetic construct
  misc_feature 1..19: note = Synthetic sequence or unknown origin
  source 1..19: mol_type = other RNA
aaggtttttaacctataat

SEQ ID NO: 1506 - RNA, 14 nt, synthetic construct
  misc_feature 1..14: note = Synthetic sequence or unknown origin
  source 1..14: mol_type = other RNA
aaggtttttaacct

SEQ ID NO: 1507 - RNA, 15 nt, synthetic construct
  misc_feature 1..15: note = Synthetic sequence or unknown origin
  source 1..15: mol_type = other RNA
gccaattcatttggt

SEQ ID NO: 1508 - RNA, 15 nt, synthetic construct
  misc_feature 1..15: note = Synthetic sequence or unknown origin
  source 1..15: mol_type = other RNA
gccaattcatttggt

SEQ ID NO: 1509 - RNA, 14 nt, synthetic construct
  misc_feature 1..14: note = Synthetic sequence or unknown origin
  source 1..14: mol_type = other RNA
ttcgcttaggcgaa

SEQ ID NO: 1510 - RNA, 14 nt, synthetic construct
  misc_feature 1..14: note = Synthetic sequence or unknown origin
  source 1..14: mol_type = other RNA
ttcgcttaggcgaa

SEQ ID NO: 1511 - RNA, 38 nt, synthetic construct
  misc_feature 1..38: note = Synthetic sequence or unknown origin
  source 1..38: mol_type = other RNA
aaatgagagttctaattatttaggacttttattttttt

SEQ ID NO: 1512 - RNA, 34 nt, synthetic construct
  misc_feature 1..34: note = Synthetic sequence or unknown origin
  source 1..34: mol_type = other RNA
aaatgagagttctaattatttaggacttttattt

SEQ ID NO: 1513 - RNA, 31 nt, synthetic construct
  misc_feature 1..31: note = Synthetic sequence or unknown origin
  source 1..31: mol_type = other RNA
aaatgagagttctaattatttaggactttta

SEQ ID NO: 1514 - RNA, 130 nt, synthetic construct
  misc_feature 1..130: note = Synthetic sequence or unknown origin
  source 1..130: mol_type = other RNA
gttctagaagtatgttattgaaaaatagcataatgagttagaataaggtttctaacctataatgccaattcatttggtttcgcttaggcgaaaaatgagagttctaattatttaggactcttattttttt

SEQ ID NO: 1515 - RNA, 19 nt, synthetic construct
  misc_feature 1..19: note = Synthetic sequence or unknown origin
  source 1..19: mol_type = other RNA
gttctagaagtatgttatt

SEQ ID NO: 1516 - RNA, 15 nt, synthetic construct
  misc_feature 1..15: note = Synthetic sequence or unknown origin
  source 1..15: mol_type = other RNA
gttctagaagtatgt

SEQ ID NO: 1517 - RNA, 12 nt, synthetic construct
  misc_feature 1..12: note = Synthetic sequence or unknown origin
  source 1..12: mol_type = other RNA
gttctagaagta

SEQ ID NO: 1518 - RNA, 10 nt, synthetic construct
  misc_feature 1..10: note = Synthetic sequence or unknown origin
  source 1..10: mol_type = other RNA
gttctagaag

SEQ ID NO: 1519 - RNA, 21 nt, synthetic construct
  misc_feature 1..21: note = Synthetic sequence or unknown origin
  source 1..21: mol_type = other RNA
aatagcataatgagttagaat

SEQ ID NO: 1520 - RNA, 17 nt, synthetic construct
  misc_feature 1..17: note = Synthetic sequence or unknown origin
  source 1..17: mol_type = other RNA
gcataatgagttagaat

SEQ ID NO: 1521 - RNA, 14 nt, synthetic construct
  misc_feature 1..14: note = Synthetic sequence or unknown origin
  source 1..14: mol_type = other RNA
taatgagttagaat

SEQ ID NO: 1522 - RNA, 12 nt, synthetic construct
  misc_feature 1..12: note = Synthetic sequence or unknown origin
  source 1..12: mol_type = other RNA
atgagttagaat

SEQ ID NO: 1523 - RNA, 19 nt, synthetic construct
  misc_feature 1..19: note = Synthetic sequence or unknown origin
  source 1..19: mol_type = other RNA
aaggtttctaacctataat

SEQ ID NO: 1524 - RNA, 14 nt, synthetic construct
  misc_feature 1..14: note = Synthetic sequence or unknown origin
  source 1..14: mol_type = other RNA
aaggtttctaacct

SEQ ID NO: 1525 - RNA, 38 nt, synthetic construct
  misc_feature 1..38: note = Synthetic sequence or unknown origin
  source 1..38: mol_type = other RNA
aaatgagagttctaattatttaggactcttattttttt

SEQ ID NO: 1526 - RNA, 34 nt, synthetic construct
  misc_feature 1..34: note = Synthetic sequence or unknown origin
  source 1..34: mol_type = other RNA
aaatgagagttctaattatttaggactcttattt

SEQ ID NO: 1527 - RNA, 31 nt, synthetic construct
  misc_feature 1..31: note = Synthetic sequence or unknown origin
  source 1..31: mol_type = other RNA
aaatgagagttctaattatttaggactctta

SEQ ID NO: 1528 - RNA, 124 nt, synthetic construct
  misc_feature 1..124: note = Synthetic sequence or unknown origin
  source 1..124: mol_type = other RNA
gttttagaagtatgttattgaaaaatagcataatgagttaaaataaggtttttaacctataatgccaattcatttggtttcgcttaggcgaaaaatgagagttctaattatttaggactttttt

SEQ ID NO: 1529 - RNA, 18 nt, synthetic construct
  misc_feature 1..18: note = Synthetic sequence or unknown origin
  source 1..18: mol_type = other RNA
ttcgcttaggcgaaaaat

SEQ ID NO: 1530 - RNA, 28 nt, synthetic construct
  misc_feature 1..28: note = Synthetic sequence or unknown origin
  source 1..28: mol_type = other RNA
gagagttctaattatttaggactttttt

SEQ ID NO: 1531 - RNA, 26 nt, synthetic construct
  misc_feature 1..26: note = Synthetic sequence or unknown origin
  source 1..26: mol_type = other RNA
gagagttctaattatttaggactttt

SEQ ID NO: 1532 - RNA, 22 nt, synthetic construct
  misc_feature 1..22: note = Synthetic sequence or unknown origin
  source 1..22: mol_type = other RNA
gagagttctaattatttaggac

SEQ ID NO: 1533 - RNA, 124 nt, synthetic construct
  misc_feature 1..124: note = Synthetic sequence or unknown origin
  source 1..124: mol_type = other RNA
gttctagaagtatgttattgaaaaatagcataatgagttagaataaggtttctaacctataatgccaattcatttggtttcgcttaggcgaaaaatgagagttctaattatttaggactttttt

SEQ ID NO: 1534 - RNA, 115 nt, synthetic construct
  misc_feature 1..115: note = Synthetic sequence or unknown origin
  source 1..115: mol_type = other RNA
gtttgagagtagtgtaagaaattacactacaagttcaaataaaaatttattcaacccgtcgctttgcgacctcacagtgtgtgagttacgacctgcttttaagtaggtctttttt

SEQ ID NO: 1535 - RNA, 17 nt, synthetic construct
  misc_feature 1..17: note = Synthetic sequence or unknown origin
  source 1..17: mol_type = other RNA
gtttgagagtagtgtaa

SEQ ID NO: 1536 - RNA, 15 nt, synthetic construct
  misc_feature 1..15: note = Synthetic sequence or unknown origin
  source 1..15: mol_type = other RNA
gtttgagagtagtgt

SEQ ID NO: 1537 - RNA, 12 nt, synthetic construct
  misc_feature 1..12: note = Synthetic sequence or unknown origin
  source 1..12: mol_type = other RNA
gtttgagagtag

SEQ ID NO: 1538 - RNA, 10 nt, synthetic construct
  misc_feature 1..10: note = Synthetic sequence or unknown origin
  source 1..10: mol_type = other RNA
gtttgagagt

SEQ ID NO: 1539 - RNA, 19 nt, synthetic construct
  misc_feature 1..19: note = Synthetic sequence or unknown origin
  source 1..19: mol_type = other RNA
ttacactacaagttcaaat

SEQ ID NO: 1540 - RNA, 17 nt, synthetic construct
  misc_feature 1..17: note = Synthetic sequence or unknown origin
  source 1..17: mol_type = other RNA
acactacaagttcaaat

SEQ ID NO: 1541 - RNA, 14 nt, synthetic construct
  misc_feature 1..14: note = Synthetic sequence or unknown origin
  source 1..14: mol_type = other RNA
ctacaagttcaaat

SEQ ID NO: 1542 - RNA, 12 nt, synthetic construct
  misc_feature 1..12: note = Synthetic sequence or unknown origin
  source 1..12: mol_type = other RNA
acaagttcaaat

SEQ ID NO: 1543 - RNA, 30 nt, synthetic construct
  misc_feature 1..30: note = Synthetic sequence or unknown origin
  source 1..30: mol_type = other RNA
aaaaatttattcaacccgtcgctttgcgac

SEQ ID NO: 1544 - RNA, 30 nt, synthetic construct; identical to SEQ ID NO: 1543
  misc_feature 1..30: note = Synthetic sequence or unknown origin
  source 1..30: mol_type = other RNA

SEQ ID NO: 1545 - RNA, 19 nt, synthetic construct
  misc_feature 1..19: note = Synthetic sequence or unknown origin
  source 1..19: mol_type = other RNA
ctcacagtgtgtgagttac

SEQ ID NO: 1546 - RNA, 15 nt, synthetic construct
  misc_feature 1..15: note = Synthetic sequence or unknown origin
  source 1..15: mol_type = other RNA
ctcacagtgtgtgag

SEQ ID NO: 1547 - RNA, 26 nt, synthetic construct
  misc_feature 1..26: note = Synthetic sequence or unknown origin
  source 1..26: mol_type = other RNA
gacctgcttttaagtaggtctttttt

SEQ ID NO: 1548 - RNA, 20 nt, synthetic construct
  misc_feature 1..20: note = Synthetic sequence or unknown origin
  source 1..20: mol_type = other RNA
gacctgcttttaagtaggtc

SEQ ID NO: 1549 - RNA, 20 nt, synthetic construct
  misc_feature 1..20: note = Synthetic sequence or unknown origin
  source 1..20: mol_type = other RNA
gacctgcttttaagtaggtc

SEQ ID NO: 1550 - RNA, 115 nt, synthetic construct
  misc_feature 1..115: note = Synthetic sequence or unknown origin
  source 1..115: mol_type = other RNA
gtttgagagtagtgtaagaaattacactacaagttcaaataaaaatttattcaacccgtcgctttgcgacctcacagtgtgtgagttacgacctgctttcaagtaggtctttttt

SEQ ID NO: 1551 - RNA, 26 nt, synthetic construct
  misc_feature 1..26: note = Synthetic sequence or unknown origin
  source 1..26: mol_type = other RNA
gacctgctttcaagtaggtctttttt

SEQ ID NO: 1552 - RNA, 20 nt, synthetic construct
  misc_feature 1..20: note = Synthetic sequence or unknown origin
  source 1..20: mol_type = other RNA
gacctgctttcaagtaggtc

SEQ ID NO: 1553 - RNA, 20 nt, synthetic construct
  misc_feature 1..20: note = Synthetic sequence or unknown origin
  source 1..20: mol_type = other RNA
gacctgctttcaagtaggtc

SEQ ID NO: 1554 - RNA, 102 nt, synthetic construct
  misc_feature 1..102: note = Synthetic sequence or unknown origin
  source 1..102: mol_type = other RNA
gtttgagagtagtgtaagaaattacactacaagttcaaataaaaatttattcaacccgtcgctttgcgacctcacagtgtgtgagttacgacctgctttttt

SEQ ID NO: 1555 - RNA, 32 nt, synthetic construct
  misc_feature 1..32: note = Synthetic sequence or unknown origin
  source 1..32: mol_type = other RNA
ctcacagtgtgtgagttacgacctgctttttt

SEQ ID NO: 1556 - RNA, 26 nt, synthetic construct
  misc_feature 1..26: note = Synthetic sequence or unknown origin
  source 1..26: mol_type = other RNA
ctcacagtgtgtgagttacgacctgc

SEQ ID NO: 1557 - RNA, 114 nt, synthetic construct
  misc_feature 1..114: note = Synthetic sequence or unknown origin
  source 1..114: mol_type = other RNA
gtttgagagtagtgtaagaaattacactacaagttcaaataagcttatagcgaaatcatcgcattgcgaactcacagtgggtgagcgaaaaagactccttcgggagtctttttt

SEQ ID NO: 1558 - RNA, 17 nt, synthetic construct
  misc_feature 1..17: note = Synthetic sequence or unknown origin
  source 1..17: mol_type = other RNA
gtttgagagtagtgtaa

SEQ ID NO: 1559 - RNA, 15 nt, synthetic construct
  misc_feature 1..15: note = Synthetic sequence or unknown origin
  source 1..15: mol_type = other RNA
gtttgagagtagtgt

SEQ ID NO: 1560 - RNA, 12 nt, synthetic construct
  misc_feature 1..12: note = Synthetic sequence or unknown origin
  source 1..12: mol_type = other RNA
gtttgagagtag

SEQ ID NO: 1561 - RNA, 10 nt, synthetic construct
  misc_feature 1..10: note = Synthetic sequence or unknown origin
  source 1..10: mol_type = other RNA
gtttgagagt

SEQ ID NO: 1562 - RNA, 19 nt, synthetic construct
  misc_feature 1..19: note = Synthetic sequence or unknown origin
  source 1..19: mol_type = other RNA
ttacactacaagttcaaat

SEQ ID NO: 1563 - RNA, 17 nt, synthetic construct
  misc_feature 1..17: note = Synthetic sequence or unknown origin
  source 1..17: mol_type = other RNA
acactacaagttcaaat

SEQ ID NO: 1564 - RNA, 14 nt, synthetic construct
  misc_feature 1..14: note = Synthetic sequence or unknown origin
  source 1..14: mol_type = other RNA
ctacaagttcaaat

SEQ ID NO: 1565 - RNA, 12 nt, synthetic construct
  misc_feature 1..12: note = Synthetic sequence or unknown origin
  source 1..12: mol_type = other RNA
acaagttcaaat

SEQ ID NO: 1566 - RNA, 25 nt, synthetic construct
  misc_feature 1..25: note = Synthetic sequence or unknown origin
  source 1..25: mol_type = other RNA
aagcttatagcgaaatcatcgcatt

SEQ ID NO: 1567 - RNA, 22 nt, synthetic construct
  misc_feature 1..22: note = Synthetic sequence or unknown origin
  source 1..22: mol_type = other RNA
aagcttatagcgaaatcatcgc

SEQ ID NO: 1568 - RNA, 21 nt, synthetic construct
  misc_feature 1..21: note = Synthetic sequence or unknown origin
  source 1..21: mol_type = other RNA
gcgaactcacagtgggtgagc

SEQ ID NO: 1569 - RNA, 21 nt, synthetic construct
  misc_feature 1..21: note = Synthetic sequence or unknown origin
  source 1..21: mol_type = other RNA
gcgaactcacagtgggtgagc

SEQ ID NO: 1570 - RNA, 28 nt, synthetic construct
  misc_feature 1..28: note = Synthetic sequence or unknown origin
  source 1..28: mol_type = other RNA
gaaaaagactccttcgggagtctttttt

SEQ ID NO: 1571 - RNA, 28 nt, synthetic construct
  misc_feature 1..28: note = Synthetic sequence or unknown origin
  source 1..28: mol_type = other RNA
gaaaaagactccttcgggagtctttttt

SEQ ID NO: 1572 - RNA, 22 nt, synthetic construct
  misc_feature 1..22: note = Synthetic sequence or unknown origin
  source 1..22: mol_type = other RNA
gaaaaagactccttcgggagtc

SEQ ID NO: 1573 - RNA, 179 nt, synthetic construct
  misc_feature 1..179: note = Synthetic sequence or unknown origin
  source 1..179: mol_type = other RNA
gttttaggtctatgtaagaaattacatagcagttaaaataaatgttaaacaaaaagcctttttaataaggtgttgcgttggcaacgaatttagaggaccttttcggttctctttttttgttgtaaaagctttgtagaaatgctttgcatttttgcggtattgcccatgcaaactttttt

SEQ ID NO: 1574 - RNA, 17 nt, synthetic construct
  misc_feature 1..17: note = Synthetic sequence or unknown origin
  source 1..17: mol_type = other RNA
gttttaggtctatgtaa

SEQ ID NO: 1575 - RNA, 15 nt, synthetic construct
  misc_feature 1..15: note = Synthetic sequence or unknown origin
  source 1..15: mol_type = other RNA
gttttaggtctatgt

SEQ ID NO: 1576 - RNA, 12 nt, synthetic construct
  misc_feature 1..12: note = Synthetic sequence or unknown origin
  source 1..12: mol_type = other RNA
gttttaggtcta

SEQ ID NO: 1577 - RNA, 10 nt, synthetic construct
  misc_feature 1..10: note = Synthetic sequence or unknown origin
  source 1..10: mol_type = other RNA
gttttaggtc

SEQ ID NO: 1578 - RNA, 18 nt, synthetic construct
  misc_feature 1..18: note = Synthetic sequence or unknown origin
  source 1..18: mol_type = other RNA
ttacatagcagttaaaat

SEQ ID NO: 1579 - RNA, 16 nt, synthetic construct
  misc_feature 1..16: note = Synthetic sequence or unknown origin
  source 1..16: mol_type = other RNA
acatagcagttaaaat

SEQ ID NO: 1580 - RNA, 13 nt, synthetic construct
  misc_feature 1..13: note = Synthetic sequence or unknown origin
  source 1..13: mol_type = other RNA
tagcagttaaaat

SEQ ID NO: 1581 - RNA, 11 nt, synthetic construct
  misc_feature 1..11: note = Synthetic sequence or unknown origin
  source 1..11: mol_type = other RNA
gcagttaaaat

SEQ ID NO: 1582 - RNA, 35 nt, synthetic construct
  misc_feature 1..35: note = Synthetic sequence or unknown origin
  source 1..35: mol_type = other RNA
aaatgttaaacaaaaagcctttttaataaggtgtt

SEQ ID NO: 1583 - RNA, 32 nt, synthetic construct
  misc_feature 1..32: note = Synthetic sequence or unknown origin
  source 1..32: mol_type = other RNA
aaatgttaaacaaaaagcctttttaataaggt

SEQ ID NO: 1584 - RNA, 58 nt, synthetic construct
  misc_feature 1..58: note = Synthetic sequence or unknown origin
  source 1..58: mol_type = other RNA
gcgttggcaacgaatttagaggaccttttcggttctctttttttgttgtaaaagcttt

SEQ ID NO: 1585 - RNA, 55 nt, synthetic construct
  misc_feature 1..55: note = Synthetic sequence or unknown origin
  source 1..55: mol_type = other RNA
gcgttggcaacgaatttagaggaccttttcggttctctttttttgttgtaaaagc

SEQ ID NO: 1586 - RNA, 23 nt, synthetic construct
  misc_feature 1..23: note = Synthetic sequence or unknown origin
  source 1..23: mol_type = other RNA
gtagaaatgctttgcatttttgc

SEQ ID NO: 1587 - RNA, 23 nt, synthetic construct
  misc_feature 1..23: note = Synthetic sequence or unknown origin
  source 1..23: mol_type = other RNA
gtagaaatgctttgcatttttgc

SEQ ID NO: 1588 - RNA, 24 nt, synthetic construct
  misc_feature 1..24: note = Synthetic sequence or unknown origin
  source 1..24: mol_type = other RNA
ggtattgcccatgcaaactttttt

SEQ ID NO: 1589 - RNA, 19 nt, synthetic construct
  misc_feature 1..19: note = Synthetic sequence or unknown origin
  source 1..19: mol_type = other RNA
ggtattgcccatgcaaact

SEQ ID NO: 1590 - RNA, 18 nt, synthetic construct
  misc_feature 1..18: note = Synthetic sequence or unknown origin
  source 1..18: mol_type = other RNA
ggtattgcccatgcaaac

SEQ ID NO: 1591 - RNA, 179 nt, synthetic construct
  misc_feature 1..179: note = Synthetic sequence or unknown origin
  source 1..179: mol_type = other RNA
gttctaggtctatgtaagaaattacatagcagttagaataaatgttaaacaaaaagcctttctaataaggtgttgcgttggcaacgaatttagaggaccttctcggttctctttctttgttgtaaaagctttgtagaaatgctttgcatttctgcggtattgcccatgcaaactttttt

SEQ ID NO: 1592 - RNA, 17 nt, synthetic construct
  misc_feature 1..17: note = Synthetic sequence or unknown origin
  source 1..17: mol_type = other RNA
gttctaggtctatgtaa

SEQ ID NO: 1593 - RNA, 15 nt, synthetic construct
  misc_feature 1..15: note = Synthetic sequence or unknown origin
  source 1..15: mol_type = other RNA
gttctaggtctatgt

SEQ ID NO: 1594 - RNA, 12 nt, synthetic construct
  misc_feature 1..12: note = Synthetic sequence or unknown origin
  source 1..12: mol_type = other RNA
gttctaggtcta

SEQ ID NO: 1595 - RNA, 10 nt, synthetic construct
  misc_feature 1..10: note = Synthetic sequence or unknown origin
  source 1..10: mol_type = other RNA
gttctaggtc

SEQ ID NO: 1596 - RNA, 18 nt, synthetic construct
  misc_feature 1..18: note = Synthetic sequence or unknown origin
  source 1..18: mol_type = other RNA
ttacatagcagttagaat

SEQ ID NO: 1597 - RNA, 16 nt, synthetic construct
  misc_feature 1..16: note = Synthetic sequence or unknown origin
  source 1..16: mol_type = other RNA
acatagcagttagaat

SEQ ID NO: 1598 - RNA, 13 nt, synthetic construct
  misc_feature 1..13: note = Synthetic sequence or unknown origin
  source 1..13: mol_type = other RNA
tagcagttagaat

SEQ ID NO: 1599 - RNA, 11 nt, synthetic construct
  misc_feature 1..11: note = Synthetic sequence or unknown origin
  source 1..11: mol_type = other RNA
gcagttagaat

SEQ ID NO: 1600 - RNA, 35 nt, synthetic construct
  misc_feature 1..35: note = Synthetic sequence or unknown origin
  source 1..35: mol_type = other RNA
aaatgttaaacaaaaagcctttctaataaggtgtt

SEQ ID NO: 1601 - RNA, 32 nt, synthetic construct
  misc_feature 1..32: note = Synthetic sequence or unknown origin
  source 1..32: mol_type = other RNA
aaatgttaaacaaaaagcctttctaataaggt

SEQ ID NO: 1602 - RNA, 58 nt, synthetic construct
  misc_feature 1..58: note = Synthetic sequence or unknown origin
  source 1..58: mol_type = other RNA
gcgttggcaacgaatttagaggaccttctcggttctctttctttgttgtaaaagcttt

SEQ ID NO: 1603 - RNA, 55 nt, synthetic construct
  misc_feature 1..55: note = Synthetic sequence or unknown origin
  source 1..55: mol_type = other RNA
gcgttggcaacgaatttagaggaccttctcggttctctttctttgttgtaaaagc

SEQ ID NO: 1604 - RNA, 23 nt, synthetic construct
  misc_feature 1..23: note = Synthetic sequence or unknown origin
  source 1..23: mol_type = other RNA
gtagaaatgctttgcatttctgc

SEQ ID NO: 1605 - RNA, 23 nt, synthetic construct
  misc_feature 1..23: note = Synthetic sequence or unknown origin
  source 1..23: mol_type = other RNA
gtagaaatgctttgcatttctgc

SEQ ID NO: 1606 - RNA, 118 nt, synthetic construct
  misc_feature 1..118: note = Synthetic sequence or unknown origin
  source 1..118: mol_type = other RNA
gttttaggtctatgtaagaaattacatagcagttaaaataaatgttaaacaaaaagcctttttaataaggtgttgcgttggcaacgaatttagaggaccttttcggttctcttttttt

SEQ ID NO: 1607 - RNA, 32 nt, synthetic construct; identical to SEQ ID NO: 1583
  misc_feature 1..32: note = Synthetic sequence or unknown origin
  source 1..32: mol_type = other RNA

SEQ ID NO: 1608 - RNA, 20 nt, synthetic construct
  misc_feature 1..20: note = Synthetic sequence or unknown origin
  source 1..20: mol_type = other RNA
gttgcgttggcaacgaattt

SEQ ID NO: 1609 - RNA, 14 nt, synthetic construct
  misc_feature 1..14: note = Synthetic sequence or unknown origin
  source 1..14: mol_type = other RNA
gttgcgttggcaac

SEQ ID NO: 1610 - RNA, 27 nt, synthetic construct
  misc_feature 1..27: note = Synthetic sequence or unknown origin
  source 1..27: mol_type = other RNA
agaggaccttttcggttctcttttttt

SEQ ID NO: 1611 - RNA, 21 nt, synthetic construct
  misc_feature 1..21: note = Synthetic sequence or unknown origin
  source 1..21: mol_type = other RNA
agaggaccttttcggttctct

SEQ ID NO: 1612 - RNA, 20 nt, synthetic construct
  misc_feature 1..20: note = Synthetic sequence or unknown origin
  source 1..20: mol_type = other RNA
agaggaccttttcggttctc

SEQ ID NO: 1613 - RNA, 118 nt, synthetic construct
  misc_feature 1..118: note = Synthetic sequence or unknown origin
  source 1..118: mol_type = other RNA
gttctaggtctatgtaagaaattacatagcagttagaataaatgttaaacaaaaagcctttctaataaggtgttgcgttggcaacgaatttagaggaccttctcggttctcttttttt

SEQ ID NO: 1614 - RNA, 32 nt, synthetic construct; identical to SEQ ID NO: 1601
  misc_feature 1..32: note = Synthetic sequence or unknown origin
  source 1..32: mol_type = other RNA

SEQ ID NO: 1615 - RNA, 27 nt, synthetic construct
  misc_feature 1..27: note = Synthetic sequence or unknown origin
  source 1..27: mol_type = other RNA
agaggaccttctcggttctcttttttt

SEQ ID NO: 1616 - RNA, 21 nt, synthetic construct
  misc_feature 1..21: note = Synthetic sequence or unknown origin
  source 1..21: mol_type = other RNA
agaggaccttctcggttctct

SEQ ID NO: 1617 - RNA, 20 nt, synthetic construct
  misc_feature 1..20: note = Synthetic sequence or unknown origin
  source 1..20: mol_type = other RNA
agaggaccttctcggttctc

SEQ ID NO: 1618 - RNA, 92 nt, synthetic construct
  misc_feature 1..92: note = Synthetic sequence or unknown origin
  source 1..92: mol_type = other RNA
gtttgagagtagtgtagaaatacactactaagttcaaataagcttttagcgaaatcatcgtttaacgaattcacagtgtgtgaacctttttt

SEQ ID NO: 1619 - RNA, 16 nt, synthetic construct
  misc_feature 1..16: note = Synthetic sequence or unknown origin
  source 1..16: mol_type = other RNA
gtttgagagtagtgta

SEQ ID NO: 1620 - RNA, 15 nt, synthetic construct
  misc_feature 1..15: note = Synthetic sequence or unknown origin
  source 1..15: mol_type = other RNA
gtttgagagtagtgt

SEQ ID NO: 1621 - RNA, 12 nt, synthetic construct
  misc_feature 1..12: note = Synthetic sequence or unknown origin
  source 1..12: mol_type = other RNA
gtttgagagtag

SEQ ID NO: 1622 - RNA, 10 nt, synthetic construct
  misc_feature 1..10: note = Synthetic sequence or unknown origin
  source 1..10: mol_type = other RNA
gtttgagagt

SEQ ID NO: 1623 - RNA, 19 nt, synthetic construct
  misc_feature 1..19: note = Synthetic sequence or unknown origin
  source 1..19: mol_type = other RNA
tacactactaagttcaaat

SEQ ID NO: 1624 - RNA, 18 nt, synthetic construct
  misc_feature 1..18: note = Synthetic sequence or unknown origin
  source 1..18: mol_type = other RNA
acactactaagttcaaat

SEQ ID NO: 1625 - RNA, 15 nt, synthetic construct
  misc_feature 1..15: note = Synthetic sequence or unknown origin
  source 1..15: mol_type = other RNA
ctactaagttcaaat

SEQ ID NO: 1626 - RNA, 13 nt, synthetic construct
  misc_feature 1..13: note = Synthetic sequence or unknown origin
  source 1..13: mol_type = other RNA
actaagttcaaat

SEQ ID NO: 1627 - RNA, 30 nt, synthetic construct
  misc_feature 1..30: note = Synthetic sequence or unknown origin
  source 1..30: mol_type = other RNA
aagcttttagcgaaatcatcgtttaacgaa

SEQ ID NO: 1628 - RNA, 23 nt, synthetic construct
  misc_feature 1..23: note = Synthetic sequence or unknown origin
  source 1..23: mol_type = other RNA
aagcttttagcgaaatcatcgtt

SEQ ID NO: 1629 - RNA, 23 nt, synthetic construct
  misc_feature 1..23: note = Synthetic sequence or unknown origin
  source 1..23: mol_type = other RNA
ttcacagtgtgtgaacctttttt

SEQ ID NO: 1630 - RNA, 15 nt, synthetic construct
  misc_feature 1..15: note = Synthetic sequence or unknown origin
  source 1..15: mol_type = other RNA
ttcacagtgtgtgaa

SEQ ID NO: 1631 - RNA, 17 nt, synthetic construct
  misc_feature 1..17: note = Synthetic sequence or unknown origin
  source 1..17: mol_type = other RNA
ttcacagtgtgtgaacc

SEQ ID NO: 1632 - RNA, 92 nt, synthetic construct
  misc_feature 1..92: note = Synthetic sequence or unknown origin
  source 1..92: mol_type = other RNA
gtttgagagtagtgtagaaatacactactaagttcaaataagcttctagcgaaatcatcgtttaacgaattcacagtgtgtgaacctttttt

SEQ ID NO: 1633 - RNA, 30 nt, synthetic construct
  misc_feature 1..30: note = Synthetic sequence or unknown origin
  source 1..30: mol_type = other RNA
aagcttctagcgaaatcatcgtttaacgaa

SEQ ID NO: 1634 - RNA, 23 nt, synthetic construct
  misc_feature 1..23: note = Synthetic sequence or unknown origin
  source 1..23: mol_type = other RNA
aagcttctagcgaaatcatcgtt

SEQ ID NO: 1635 - RNA, 112 nt, synthetic construct
  misc_feature 1..112: note = Synthetic sequence or unknown origin
  source 1..112: mol_type = other RNA
gtttgagagtagtgtaagaaattacactatgcgttcaaataacgatttatcgaaaccgctgctttgcagcatcacagtgtgtgattaaagacctgttcaccaggtctttttt

SEQ ID NO: 1636 - RNA, 17 nt, synthetic construct
  misc_feature 1..17: note = Synthetic sequence or unknown origin
  source 1..17: mol_type = other RNA
gtttgagagtagtgtaa

SEQ ID NO: 1637 - RNA, 15 nt, synthetic construct
  misc_feature 1..15: note = Synthetic sequence or unknown origin
  source 1..15: mol_type = other RNA
gtttgagagtagtgt

SEQ ID NO: 1638 - RNA, 12 nt, synthetic construct
  misc_feature 1..12: note = Synthetic sequence or unknown origin
  source 1..12: mol_type = other RNA
gtttgagagtag

SEQ ID NO: 1639 - RNA, 10 nt, synthetic construct
  misc_feature 1..10: note = Synthetic sequence or unknown origin
  source 1..10: mol_type = other RNA
gtttgagagt

SEQ ID NO: 1640 - RNA, 19 nt, synthetic construct
  misc_feature 1..19: note = Synthetic sequence or unknown origin
  source 1..19: mol_type = other RNA
ttacactatgcgttcaaat

SEQ ID NO: 1641 - RNA, 17 nt, synthetic construct
  misc_feature 1..17: note = Synthetic sequence or unknown origin
  source 1..17: mol_type = other RNA
acactatgcgttcaaat

SEQ ID NO: 1642 - RNA, 14 nt, synthetic construct
  misc_feature 1..14: note = Synthetic sequence or unknown origin
  source 1..14: mol_type = other RNA
ctatgcgttcaaat

SEQ ID NO: 1643 - RNA, 12 nt, synthetic construct
  misc_feature 1..12: note = Synthetic sequence or unknown origin
  source 1..12: mol_type = other RNA
atgcgttcaaat

SEQ ID NO: 1644 - RNA, 17 nt, synthetic construct
  misc_feature 1..17: note = Synthetic sequence or unknown origin
  source 1..17: mol_type = other RNA
aacgatttatcgaaacc

SEQ ID NO: 1645 - RNA, 12 nt, synthetic construct
  misc_feature 1..12: note = Synthetic sequence or unknown origin
  source 1..12: mol_type = other RNA
aacgatttatcg

SEQ ID NO: 1646 - RNA, 13 nt, synthetic construct
  misc_feature 1..13: note = Synthetic sequence or unknown origin
  source 1..13: mol_type = other RNA
gctgctttgcagc

SEQ ID NO: 1647 - RNA, 13 nt, synthetic construct
  misc_feature 1..13: note = Synthetic sequence or unknown origin
  source 1..13: mol_type = other RNA
gctgctttgcagc

SEQ ID NO: 1648 - RNA, 16 nt, synthetic construct
  misc_feature 1..16: note = Synthetic sequence or unknown origin
  source 1..16: mol_type = other RNA
atcacagtgtgtgatt

SEQ ID NO: 1649 - RNA, 15 nt, synthetic construct
  misc_feature 1..15: note = Synthetic sequence or unknown origin
  source 1..15: mol_type = other RNA
atcacagtgtgtgat

SEQ ID NO: 1650 - RNA, 26 nt, synthetic construct
  misc_feature 1..26: note = Synthetic sequence or unknown origin
  source 1..26: mol_type = other RNA
aaagacctgttcaccaggtctttttt

SEQ ID NO: 1651 - RNA, 23 nt, synthetic construct
  misc_feature 1..23: note = Synthetic sequence or unknown origin
  source 1..23: mol_type = other RNA
aaagacctgttcaccaggtcttt

SEQ ID NO: 1652 - RNA, 20 nt, synthetic construct
  misc_feature 1..20: note = Synthetic sequence or unknown origin
  source 1..20: mol_type = other RNA
aaagacctgttcaccaggtc

SEQ ID NO: 1653 - RNA, 90 nt, synthetic construct
  misc_feature 1..90: note = Synthetic sequence or unknown origin
  source 1..90: mol_type = other RNA
gtttgagagtagtgtaagaaattacactatgcgttcaaataacgatttatcgaaaccgctgctttgcagcatcacagtgtgtgatttttt

SEQ ID NO: 1654 - RNA, 20 nt, synthetic construct
  misc_feature 1..20: note = Synthetic sequence or unknown origin
  source 1..20: mol_type = other RNA
atcacagtgtgtgatttttt

SEQ ID NO: 1655 - RNA, 14 nt, synthetic construct
  misc_feature 1..14: note = Synthetic sequence or unknown origin
  source 1..14: mol_type = other RNA
atcacagtgtgtga

SEQ ID NO: 1656 - RNA, 119 nt, synthetic construct
  misc_feature 1..119: note = Synthetic sequence or unknown origin
  source 1..119: mol_type = other RNA
gtttgagtatggtgtaagaaattacaccattagttcaaataagattttttcaaaccgccgttattcggtcgcacacgctgtgtgcaataggaactgttgcgttgcagcagttctttttt

SEQ ID NO: 1657 - RNA, 17 nt, synthetic construct
  misc_feature 1..17: note = Synthetic sequence or unknown origin
  source 1..17: mol_type = other RNA
gtttgagtatggtgtaa

SEQ ID NO: 1658 - RNA, 15 nt, synthetic construct
  misc_feature 1..15: note = Synthetic sequence or unknown origin
  source 1..15: mol_type = other RNA
gtttgagtatggtgt

SEQ ID NO: 1659 - RNA, 12 nt, synthetic construct
  misc_feature 1..12: note = Synthetic sequence or unknown origin
  source 1..12: mol_type = other RNA
gtttgagtatgg

SEQ ID NO: 1660 - RNA, 10 nt, synthetic construct
  misc_feature 1..10: note = Synthetic sequence or unknown origin
  source 1..10: mol_type = other RNA
gtttgagtat

SEQ ID NO: 1661 - RNA, 19 nt, synthetic construct
  misc_feature 1..19: note = Synthetic sequence or unknown origin
  source 1..19: mol_type = other RNA
ttacaccattagttcaaat

SEQ ID NO: 1662 - RNA, 17 nt, synthetic construct
  misc_feature 1..17: note = Synthetic sequence or unknown origin
  source 1..17: mol_type = other RNA
acaccattagttcaaat

SEQ ID NO: 1663 - RNA, 14 nt, synthetic construct
  misc_feature 1..14: note = Synthetic sequence or unknown origin
  source 1..14: mol_type = other RNA
ccattagttcaaat

SEQ ID NO: 1664 - RNA, 12 nt, synthetic construct
  misc_feature 1..12: note = Synthetic sequence or unknown origin
  source 1..12: mol_type = other RNA
attagttcaaat

SEQ ID NO: 1665 - RNA, 30 nt, synthetic construct
  misc_feature 1..30: note = Synthetic sequence or unknown origin
  source 1..30: mol_type = other RNA
aagattttttcaaaccgccgttattcggtc

SEQ ID NO: 1666 - RNA, 29 nt, synthetic construct
  misc_feature 1..29: note = Synthetic sequence or unknown origin
  source 1..29: mol_type = other RNA
aagattttttcaaaccgccgttattcggt

SEQ ID NO: 1667 - RNA, 18 nt, synthetic construct
  misc_feature 1..18: note = Synthetic sequence or unknown origin
  source 1..18: mol_type = other RNA
gcacacgctgtgtgcaat

SEQ ID NO: 1668 - RNA, 15 nt, synthetic construct
  misc_feature 1..15: note = Synthetic sequence or unknown origin
  source 1..15: mol_type = other RNA
gcacacgctgtgtgc

SEQ ID NO: 1669 - RNA, 31 nt, synthetic construct
  misc_feature 1..31: note = Synthetic sequence or unknown origin
  source 1..31: mol_type = other RNA
aggaactgttgcgttgcagcagttctttttt

SEQ ID NO: 1670 - RNA, 27 nt, synthetic construct
  misc_feature 1..27: note = Synthetic sequence or unknown origin
  source 1..27: mol_type = other RNA
aggaactgttgcgttgcagcagttctt

SEQ ID NO: 1671 - RNA, 25 nt, synthetic construct
  misc_feature 1..25: note = Synthetic sequence or unknown origin
  source 1..25: mol_type = other RNA
aggaactgttgcgttgcagcagttc

SEQ ID NO: 1672 - RNA, 119 nt, synthetic construct
  misc_feature 1..119: note = Synthetic sequence or unknown origin
  source 1..119: mol_type = other RNA
gtttgagtatggtgtaagaaattacaccattagttcaaataagattctttcaaaccgccgttattcggtcgcacacgctgtgtgcaataggaactgttgcgttgcagcagttctttttt

SEQ ID NO: 1673 - RNA, 30 nt, synthetic construct
  misc_feature 1..30: note = Synthetic sequence or unknown origin
  source 1..30: mol_type = other RNA
aagattctttcaaaccgccgttattcggtc

SEQ ID NO: 1674 - RNA, 29 nt, synthetic construct
  misc_feature 1..29: note = Synthetic sequence or unknown origin
  source 1..29: mol_type = other RNA
aagattctttcaaaccgccgttattcggt

SEQ ID NO: 1675 - RNA, 118 nt, synthetic construct
  misc_feature 1..118: note = Synthetic sequence or unknown origin
  source 1..118: mol_type = other RNA
gtttgagagtagtgttagaaataacactacaagttcaaataagcttcgtagcgaatcgatcgcctttggcgaactcacagtgtgtgagacagcagaccccgaaaggggtctgtttttt

SEQ ID NO: 1676 - RNA, 17 nt, synthetic construct
  misc_feature 1..17: note = Synthetic sequence or unknown origin
  source 1..17: mol_type = other RNA
gtttgagagtagtgtta

SEQ ID NO: 1677 - RNA, 15 nt, synthetic construct
  misc_feature 1..15: note = Synthetic sequence or unknown origin
  source 1..15: mol_type = other RNA
gtttgagagtagtgt

SEQ ID NO: 1678 - RNA, 12 nt, synthetic construct
  misc_feature 1..12: note = Synthetic sequence or unknown origin
  source 1..12: mol_type = other RNA
gtttgagagtag

SEQ ID NO: 1679 - RNA, 10 nt, synthetic construct
  misc_feature 1..10: note = Synthetic sequence or unknown origin
  source 1..10: mol_type = other RNA
gtttgagagt

SEQ ID NO: 1680 - RNA, 19 nt, synthetic construct
  misc_feature 1..19: note = Synthetic sequence or unknown origin
  source 1..19: mol_type = other RNA
taacactacaagttcaaat

SEQ ID NO: 1681 - RNA, 17 nt, synthetic construct
  misc_feature 1..17: note = Synthetic sequence or unknown origin
  source 1..17: mol_type = other RNA
acactacaagttcaaat

SEQ ID NO: 1682 - RNA, 14 nt, synthetic construct
  misc_feature 1..14: note = Synthetic sequence or unknown origin
  source 1..14: mol_type = other RNA
ctacaagttcaaat

SEQ ID NO: 1683 - RNA, 12 nt, synthetic construct
  misc_feature 1..12: note = Synthetic sequence or unknown origin
  source 1..12: mol_type = other RNA
acaagttcaaat

SEQ ID NO: 1684 - RNA, 19 nt, synthetic construct
  misc_feature 1..19: note = Synthetic sequence or unknown origin
  source 1..19: mol_type = other RNA
aagcttcgtagcgaatcga

SEQ ID NO: 1685 - RNA, 12 nt, synthetic construct
  misc_feature 1..12: note = Synthetic sequence or unknown origin
  source 1..12: mol_type = other RNA
aagcttcgtagc

SEQ ID NO: 1686 - RNA, 14 nt, synthetic construct
  misc_feature 1..14: note = Synthetic sequence or unknown origin
  source 1..14: mol_type = other RNA
tcgcctttggcgaa

SEQ ID NO: 1687 - RNA, 13 nt, synthetic construct
  misc_feature 1..13: note = Synthetic sequence or unknown origin
  source 1..13: mol_type = other RNA
tcgcctttggcga

SEQ ID NO: 1688 - RNA, 17 nt, synthetic construct
  misc_feature 1..17: note = Synthetic sequence or unknown origin
  source 1..17: mol_type = other RNA
ctcacagtgtgtgagac

SEQ ID NO: 1689 - RNA, 15 nt, synthetic construct
  misc_feature 1..15: note = Synthetic sequence or unknown origin
  source 1..15: mol_type = other RNA
ctcacagtgtgtgag

SEQ ID NO: 1690 - RNA, 28 nt, synthetic construct
  misc_feature 1..28: note = Synthetic sequence or unknown origin
  source 1..28: mol_type = other RNA
agcagaccccgaaaggggtctgtttttt

SEQ ID NO: 1691 - RNA, 24 nt, synthetic construct
  misc_feature 1..24: note = Synthetic sequence or unknown origin
  source 1..24: mol_type = other RNA
agcagaccccgaaaggggtctgtt

SEQ ID NO: 1692 - RNA, 22 nt, synthetic construct
  misc_feature 1..22: note = Synthetic sequence or unknown origin
  source 1..22: mol_type = other RNA
agcagaccccgaaaggggtctg

SEQ ID NO: 1693 - RNA, 135 nt, synthetic construct
  misc_feature 1..135: note = Synthetic sequence or unknown origin
  source 1..135: mol_type = other RNA
gtttgagagtagtgttagaaataacactacaagttcaaataagcttcgtagcgaatcgatcgcctttggcgaactcacagtgtgtgagacagcagaccccgaaaggggtctgtttttattttatgcgcatttttt

SEQ ID NO: 1694 - RNA, 20 nt, synthetic construct
  misc_feature 1..20: note = Synthetic sequence or unknown origin
  source 1..20: mol_type = other RNA
tcgcctttggcgaactcaca

SEQ ID NO: 1695 - RNA, 56 nt, synthetic construct
  misc_feature 1..56: note = Synthetic sequence or unknown origin
  source 1..56: mol_type = other RNA
gtgtgtgagacagcagaccccgaaaggggtctgtttttattttatgcgcatttttt

SEQ ID NO: 1696 - RNA, 49 nt, synthetic construct
  misc_feature 1..49: note = Synthetic sequence or unknown origin
  source 1..49: mol_type = other RNA
gtgtgtgagacagcagaccccgaaaggggtctgtttttattttatgcgc

SEQ ID NO: 1697 - RNA, 50 nt, synthetic construct
  misc_feature 1..50: note = Synthetic sequence or unknown origin
  source 1..50: mol_type = other RNA
gtgtgtgagacagcagaccccgaaaggggtctgtttttattttatgcgca

SEQ ID NO: 1698 - RNA, 135 nt, synthetic construct
  misc_feature 1..135: note = Synthetic sequence or unknown origin
  source 1..135: mol_type = other RNA
gtttgagagtagtgttagaaataacactacaagttcaaataagcttcgtagcgaatcgatcgcctttggcgaactcacagtgtgtgagacagcagaccccgaaaggggtctgttcttatcttatgcgcatttttt

SEQ ID NO: 1699 - RNA, 56 nt, synthetic construct
  misc_feature 1..56: note = Synthetic sequence or unknown origin
  source 1..56: mol_type = other RNA
gtgtgtgagacagcagaccccgaaaggggtctgttcttatcttatgcgcatttttt

SEQ ID NO: 1700 - RNA, 49 nt, synthetic construct
  misc_feature 1..49: note = Synthetic sequence or unknown origin
  source 1..49: mol_type = other RNA
gtgtgtgagacagcagaccccgaaaggggtctgttcttatcttatgcgc

SEQ ID NO: 1701 - RNA, 50 nt, synthetic construct
  misc_feature 1..50: note = Synthetic sequence or unknown origin
  source 1..50: mol_type = other RNA
gtgtgtgagacagcagaccccgaaaggggtctgttcttatcttatgcgca

SEQ ID NO: 1702 - RNA, 117 nt, synthetic construct
  misc_feature 1..117: note = Synthetic sequence or unknown origin
  source 1..117: mol_type = other RNA
gtttgagagtagtgtaagaaattacactacaagttcaaataagcttttagcgaaaacatcgccttcggcgaattcacagtgtgtgaactaacagactctttcaagggtctgtttttt

SEQ ID NO: 1703 - RNA, 17 nt, synthetic construct
  misc_feature 1..17: note = Synthetic sequence or unknown origin
  source 1..17: mol_type = other RNA
gtttgagagtagtgtaa

SEQ ID NO: 1704 - RNA, 15 nt, synthetic construct
  misc_feature 1..15: note = Synthetic sequence or unknown origin
  source 1..15: mol_type = other RNA
gtttgagagtagtgt

SEQ ID NO: 1705 - RNA, 12 nt, synthetic construct
  misc_feature 1..12: note = Synthetic sequence or unknown origin
  source 1..12: mol_type = other RNA
gtttgagagtag

SEQ ID NO: 1706 - RNA, 10 nt, synthetic construct
  misc_feature 1..10: note = Synthetic sequence or unknown origin
  source 1..10: mol_type = other RNA
gtttgagagt

SEQ ID NO: 1707 - RNA, 19 nt, synthetic construct
  misc_feature 1..19: note = Synthetic sequence or unknown origin
  source 1..19: mol_type = other RNA
ttacactacaagttcaaat

SEQ ID NO: 1708 - RNA, 17 nt, synthetic construct
  misc_feature 1..17: note = Synthetic sequence or unknown origin
  source 1..17: mol_type = other RNA
acactacaagttcaaat

SEQ ID NO: 1709 - RNA, 14 nt, synthetic construct
  misc_feature 1..14: note = Synthetic sequence or unknown origin
  source 1..14: mol_type = other RNA
ctacaagttcaaat

SEQ ID NO: 1710 - RNA, 12 nt, synthetic construct
  misc_feature 1..12: note = Synthetic sequence or unknown origin
  source 1..12: mol_type = other RNA
acaagttcaaat

SEQ ID NO: 1711 - RNA, 18 nt, synthetic construct
  misc_feature 1..18: note = Synthetic sequence or unknown origin
  source 1..18: mol_type = other RNA
aagcttttagcgaaaaca

SEQ ID NO: 1712 - RNA, 11 nt, synthetic construct
  misc_feature 1..11: note = Synthetic sequence or unknown origin
  source 1..11: mol_type = other RNA
aagcttttagc

SEQ ID NO: 1713 - RNA, 14 nt, synthetic construct
  misc_feature 1..14: note = Synthetic sequence or unknown origin
  source 1..14: mol_type = other RNA
tcgccttcggcgaa

SEQ ID NO: 1714 - RNA, 13 nt, synthetic construct
  misc_feature 1..13: note = Synthetic sequence or unknown origin
  source 1..13: mol_type = other RNA
tcgccttcggcga

SEQ ID NO: 1715 - RNA, 17 nt, synthetic construct
  misc_feature 1..17: note = Synthetic sequence or unknown origin
  source 1..17: mol_type = other RNA
ttcacagtgtgtgaact

SEQ ID NO: 1716 - RNA, 15 nt, synthetic construct
  misc_feature 1..15: note = Synthetic sequence or unknown origin
  source 1..15: mol_type = other RNA
ttcacagtgtgtgaa

SEQ ID NO: 1717 - RNA, 28 nt, synthetic construct
  misc_feature 1..28: note = Synthetic sequence or unknown origin
  source 1..28: mol_type = other RNA
aacagactctttcaagggtctgtttttt

SEQ ID NO: 1718 - RNA, 24 nt, synthetic construct
  misc_feature 1..24: note = Synthetic sequence or unknown origin
  source 1..24: mol_type = other RNA
aacagactctttcaagggtctgtt

SEQ ID NO: 1719 - RNA, 22 nt, synthetic construct
  misc_feature 1..22: note = Synthetic sequence or unknown origin
  source 1..22: mol_type = other RNA
aacagactctttcaagggtctg

SEQ ID NO: 1720 - RNA, 117 nt, synthetic construct
  misc_feature 1..117: note = Synthetic sequence or unknown origin
  source 1..117: mol_type = other RNA
gtttgagagtagtgtaagaaattacactacaagttcaaataagcttctagcgaaaacatcgccttcggcgaattcacagtgtgtgaactaacagactctttcaagggtctgtttttt

SEQ ID NO: 1721 - RNA, 18 nt, synthetic construct
  misc_feature 1..18: note = Synthetic sequence or unknown origin
  source 1..18: mol_type = other RNA
aagcttctagcgaaaaca

SEQ ID NO: 1722 - RNA, 11 nt, synthetic construct
  misc_feature 1..11: note = Synthetic sequence or unknown origin
  source 1..11: mol_type = other RNA
aagcttctagc

SEQ ID NO: 1723 - RNA, 78 nt, synthetic construct
  misc_feature 1..78: note = Synthetic sequence or unknown origin
  source 1..78: mol_type = other RNA
gtttgagagtagtgtaagaaattacactacaagttcaaataagcttttagcgaaaacatcgccttcggcgaatttttt

SEQ ID NO: 1724 - RNA, 11 nt, synthetic construct
  misc_feature 1..11: note = Synthetic sequence or unknown origin
  source 1..11: mol_type = other RNA
aagcttttagc

SEQ ID NO: 1725 - RNA, 27 nt, synthetic construct
  misc_feature 1..27: note = Synthetic sequence or unknown origin
  source 1..27: mol_type = other RNA
gaaaacatcgccttcggcgaatttttt

SEQ ID NO: 1726 - RNA, 27 nt, synthetic construct
  misc_feature 1..27: note = Synthetic sequence or unknown origin
  source 1..27: mol_type = other RNA
gaaaacatcgccttcggcgaatttttt

SEQ ID NO: 1727 - RNA, 21 nt, synthetic construct
  misc_feature 1..21: note = Synthetic sequence or unknown origin
  source 1..21: mol_type = other RNA
gaaaacatcgccttcggcgaa

SEQ ID NO: 1728 - RNA, 78 nt, synthetic construct
  misc_feature 1..78: note = Synthetic sequence or unknown origin
  source 1..78: mol_type = other RNA
gtttgagagtagtgtaagaaattacactacaagttcaaataagcttctagcgaaaacatcgccttcggcgaatttttt

SEQ ID NO: 1729 - RNA, 11 nt, synthetic construct
  misc_feature 1..11: note = Synthetic sequence or unknown origin
  source 1..11: mol_type = other RNA
aagcttctagc

SEQ ID NO: 1730 - RNA, 117 nt, synthetic construct
  misc_feature 1..117: note = Synthetic sequence or unknown origin
  source 1..117: mol_type = other RNA
gtttgagagtagtgtaagaaatcacactacaagttcaaataagcttttagcgaagacatcgcctctggcgaactcacagtgtgtgagacaacagactccgaaaggggtctgtttttt

SEQ ID NO: 1731 - RNA, 17 nt, synthetic construct
  misc_feature 1..17: note = Synthetic sequence or unknown origin
  source 1..17: mol_type = other RNA
gtttgagagtagtgtaa

SEQ ID NO: 1732 - RNA, 15 nt, synthetic construct
  misc_feature 1..15: note = Synthetic sequence or unknown origin
  source 1..15: mol_type = other RNA
gtttgagagtagtgt

SEQ ID NO: 1733 - RNA, 12 nt, synthetic construct
  misc_feature 1..12: note = Synthetic sequence or unknown origin
  source 1..12: mol_type = other RNA
gtttgagagtag

SEQ ID NO: 1734 - RNA, 10 nt, synthetic construct
  misc_feature 1..10: note = Synthetic sequence or unknown origin
  source 1..10: mol_type = other RNA
gtttgagagt

SEQ ID NO: 1735 - RNA, 19 nt, synthetic construct
  misc_feature 1..19: note = Synthetic sequence or unknown origin
  source 1..19: mol_type = other RNA
tcacactacaagttcaaat

SEQ ID NO: 1736 - RNA, 19 nt, synthetic construct
  misc_feature 1..19: note = Synthetic sequence or unknown origin
  source 1..19: mol_type = other RNA
tcacactacaagttcaaat

SEQ ID NO: 1737 - RNA, 14 nt, synthetic construct
  misc_feature 1..14: note = Synthetic sequence or unknown origin
  source 1..14: mol_type = other RNA
ctacaagttcaaat

SEQ ID NO: 1738 - RNA, 12 nt, synthetic construct
  misc_feature 1..12: note = Synthetic sequence or unknown origin
  source 1..12: mol_type = other RNA
acaagttcaaat

SEQ ID NO: 1739 - RNA, 18 nt, synthetic construct
  misc_feature 1..18: note = Synthetic sequence or unknown origin
  source 1..18: mol_type = other RNA
aagcttttagcgaagaca

SEQ ID NO: 1740 - RNA, 11 nt, synthetic construct
  misc_feature 1..11: note = Synthetic sequence or unknown origin
  source 1..11: mol_type = other RNA
aagcttttagc

SEQ ID NO: 1741 - RNA, 14 nt, synthetic construct
  misc_feature 1..14: note = Synthetic sequence or unknown origin
  source 1..14: mol_type = other RNA
tcgcctctggcgaa

SEQ ID NO: 1742 - RNA, 13 nt, synthetic construct
  misc_feature 1..13: note = Synthetic sequence or unknown origin
  source 1..13: mol_type = other RNA
tcgcctctggcga

SEQ ID NO: 1743 - RNA, 17 nt, synthetic construct
  misc_feature 1..17: note = Synthetic sequence or unknown origin
  source 1..17: mol_type = other RNA
ctcacagtgtgtgagac

SEQ ID NO: 1744 - RNA, 15 nt, synthetic construct
  misc_feature 1..15: note = Synthetic sequence or unknown origin
  source 1..15: mol_type = other RNA
ctcacagtgtgtgag

SEQ ID NO: 1745 - RNA, 28 nt, synthetic construct
  misc_feature 1..28: note = Synthetic sequence or unknown origin
  source 1..28: mol_type = other RNA
aacagactccgaaaggggtctgtttttt

SEQ ID NO: 1746 - RNA, 24 nt, synthetic construct
  misc_feature 1..24: note = Synthetic sequence or unknown origin
  source 1..24: mol_type = other RNA
aacagactccgaaaggggtctgtt

SEQ ID NO: 1747 - RNA, 22 nt, synthetic construct
  misc_feature 1..22: note = Synthetic sequence or unknown origin
  source 1..22: mol_type = other RNA
aacagactccgaaaggggtctg

SEQ ID NO: 1748 - RNA, 115 nt, synthetic construct
  misc_feature 1..115: note = Synthetic sequence or unknown origin
  source 1..115: mol_type = other RNA
gtttgagagtagtgtaagaaattacactacaaagttcaaataagcttgtagcgaaaccatcgcgtaagcgaactcacagtgtgtgagatcaaaaagctccgaaaggagctttttt

SEQ ID NO: 1749 - RNA, 17 nt, synthetic construct
  misc_feature 1..17: note = Synthetic sequence or unknown origin
  source 1..17: mol_type = other RNA
gtttgagagtagtgtaa

SEQ ID NO: 1750 - RNA, 15 nt, synthetic construct
  misc_feature 1..15: note = Synthetic sequence or unknown origin
  source 1..15: mol_type = other RNA
gtttgagagtagtgt

SEQ ID NO: 1751 - RNA, 12 nt, synthetic construct
  misc_feature 1..12: note = Synthetic sequence or unknown origin
  source 1..12: mol_type = other RNA
gtttgagagtag

SEQ ID NO: 1752 - RNA, 10 nt, synthetic construct
  misc_feature 1..10: note = Synthetic sequence or unknown origin
  source 1..10: mol_type = other RNA
gtttgagagt

SEQ ID NO: 1753 - RNA, 20 nt, synthetic construct
  misc_feature 1..20: note = Synthetic sequence or unknown origin
  source 1..20: mol_type = other RNA
ttacactacaaagttcaaat

SEQ ID NO: 1754 - RNA, 18 nt, synthetic construct
  misc_feature 1..18: note = Synthetic sequence or unknown origin
  source 1..18: mol_type = other RNA
acactacaaagttcaaat

SEQ ID NO: 1755 - RNA, 15 nt, synthetic construct
  misc_feature 1..15: note = Synthetic sequence or unknown origin
  source 1..15: mol_type = other RNA
ctacaaagttcaaat

SEQ ID NO: 1756 - RNA, 13 nt, synthetic construct
  misc_feature 1..13: note = Synthetic sequence or unknown origin
  source 1..13: mol_type = other RNA
acaaagttcaaat

SEQ ID NO: 1757 - RNA, 28 nt, synthetic construct
  misc_feature 1..28: note = Synthetic sequence or unknown origin
  source 1..28: mol_type = other RNA
aagcttgtagcgaaaccatcgcgtaagc

SEQ ID NO: 1758 - RNA, 28 nt, synthetic construct
  misc_feature 1..28: note = Synthetic sequence or unknown origin
  source 1..28: mol_type = other RNA
aagcttgtagcgaaaccatcgcgtaagc

SEQ ID NO: 1759 - RNA, 21 nt, synthetic construct
  misc_feature 1..21: note = Synthetic sequence or unknown origin
  source 1..21: mol_type = other RNA
gaactcacagtgtgtgagatc

SEQ ID NO: 1760 - RNA, 21 nt, synthetic construct
  misc_feature 1..21: note = Synthetic sequence or unknown origin
  source 1..21: mol_type = other RNA
gaactcacagtgtgtgagatc

SEQ ID NO: 1761 - RNA, 25 nt, synthetic construct
  misc_feature 1..25: note = Synthetic sequence or unknown origin
  source 1..25: mol_type = other RNA
aaaaagctccgaaaggagctttttt

SEQ ID NO: 1762 - RNA, 24 nt, synthetic construct
  misc_feature 1..24: note = Synthetic sequence or unknown origin
  source 1..24: mol_type = other RNA
aaaaagctccgaaaggagcttttt

SEQ ID NO: 1763 - RNA, 19 nt, synthetic construct
  misc_feature 1..19: note = Synthetic sequence or unknown origin
  source 1..19: mol_type = other RNA
aaaaagctccgaaaggagc

SEQ ID NO: 1764 - RNA, 121 nt, synthetic construct
  misc_feature 1..121: note = Synthetic sequence or unknown origin
  source 1..121: mol_type = other RNA
gtttgagagtagtgtaagaaattacactacaaagttcaaataagcttgtagcgaaaccatcgcgtaagcgaactcacagtgtgtgagatcaaaaagctccgaaaggagctttttgtttttt

SEQ ID NO: 1765 - RNA, 31 nt, synthetic construct
  misc_feature 1..31: note = Synthetic sequence or unknown origin
  source 1..31: mol_type = other RNA
aagcttgtagcgaaaccatcgcgtaagcgaa

SEQ ID NO: 1766 - RNA, 17 nt, synthetic construct
  misc_feature 1..17: note = Synthetic sequence or unknown origin
  source 1..17: mol_type = other RNA
ctcacagtgtgtgagat

SEQ ID NO: 1767 - RNA, 15 nt, synthetic construct
  misc_feature 1..15: note = Synthetic sequence or unknown origin
  source 1..15: mol_type = other RNA
ctcacagtgtgtgag

SEQ ID NO: 1768 - RNA, 32 nt, synthetic construct
  misc_feature 1..32: note = Synthetic sequence or unknown origin
  source 1..32: mol_type = other RNA
caaaaagctccgaaaggagctttttgtttttt

SEQ ID NO: 1769 - RNA, 26 nt, synthetic construct
  misc_feature 1..26: note = Synthetic sequence or unknown origin
  source 1..26: mol_type = other RNA
caaaaagctccgaaaggagctttttg

SEQ ID NO: 1770 - RNA, 26 nt, synthetic construct
  misc_feature 1..26: note = Synthetic sequence or unknown origin
  source 1..26: mol_type = other RNA
caaaaagctccgaaaggagctttttg

SEQ ID NO: 1771 - RNA, 121 nt, synthetic construct
  misc_feature 1..121: note = Synthetic sequence or unknown origin
  source 1..121: mol_type = other RNA
gtttgagagtagtgtaagaaattacactacaaagttcaaataagcttgtagcgaaaccatcgcgtaagcgaactcacagtgtgtgagatcaagaagctccgaaaggagcttcttgtttttt

SEQ ID NO: 1772 - RNA, 32 nt, synthetic construct
  misc_feature 1..32: note = Synthetic sequence or unknown origin
  source 1..32: mol_type = other RNA
caagaagctccgaaaggagcttcttgtttttt

SEQ ID NO: 1773 - RNA, 26 nt, synthetic construct
  misc_feature 1..26: note = Synthetic sequence or unknown origin
  source 1..26: mol_type = other RNA
caagaagctccgaaaggagcttcttg

SEQ ID NO: 1774 - RNA, 26 nt, synthetic construct
  misc_feature 1..26: note = Synthetic sequence or unknown origin
  source 1..26: mol_type = other RNA
caagaagctccgaaaggagcttcttg

SEQ ID NO: 1775 - RNA, 108 nt, synthetic construct
  misc_feature 1..108: note = Synthetic sequence or unknown origin
  source 1..108: mol_type = other RNA
gttttagttctatgtcgaaagacatagagagttaaaataaaggttttcgtttcgattacccaaaatgcccatttattatgtggccgactacttaggtagtcatttttt

SEQ ID NO: 1776 - RNA, 16 nt, synthetic construct
  misc_feature 1..16: note = Synthetic sequence or unknown origin
  source 1..16: mol_type = other RNA
gttttagttctatgtc

SEQ ID NO: 1777 - RNA, 15 nt, synthetic construct
  misc_feature 1..15: note = Synthetic sequence or unknown origin
  source 1..15: mol_type = other RNA
gttttagttctatgt

SEQ ID NO: 1778 - RNA, 12 nt, synthetic construct
  misc_feature 1..12: note = Synthetic sequence or unknown origin
  source 1..12: mol_type = other RNA
gttttagttcta

SEQ ID NO: 1779 - RNA, 10 nt, synthetic construct
  misc_feature 1..10: note = Synthetic sequence or unknown origin
  source 1..10: mol_type = other RNA
gttttagttc

SEQ ID NO: 1780 - RNA, 18 nt, synthetic construct
  misc_feature 1..18: note = Synthetic sequence or unknown origin
  source 1..18: mol_type = other RNA
gacatagagagttaaaat

SEQ ID NO: 1781 - RNA, 17 nt, synthetic construct
  misc_feature 1..17: note = Synthetic sequence or unknown origin
  source 1..17: mol_type = other RNA
acatagagagttaaaat

SEQ ID NO: 1782 - RNA, 14 nt, synthetic construct
  misc_feature 1..14: note = Synthetic sequence or unknown origin
  source 1..14: mol_type = other RNA
tagagagttaaaat

SEQ ID NO: 1783 - RNA, 12 nt, synthetic construct
  misc_feature 1..12: note = Synthetic sequence or unknown origin
  source 1..12: mol_type = other RNA
gagagttaaaat

SEQ ID NO: 1784 - RNA, 28 nt, synthetic construct
  misc_feature 1..28: note = Synthetic sequence or unknown origin
  source 1..28: mol_type = other RNA
aaaggttttcgtttcgattacccaaaat

SEQ ID NO: 1785 - RNA, 22 nt, synthetic construct
  misc_feature 1..22: note = Synthetic sequence or unknown origin
  source 1..22: mol_type = other RNA
aaaggttttcgtttcgattacc

SEQ ID NO: 1786 - RNA, 19 nt, synthetic construct
  misc_feature 1..19: note = Synthetic sequence or unknown origin
  source 1..19: mol_type = other RNA
gcccatttattatgtggcc

SEQ ID NO: 1787 - RNA, 18 nt, synthetic construct
  misc_feature 1..18: note = Synthetic sequence or unknown origin
  source 1..18: mol_type = other RNA
gcccatttattatgtggc

SEQ ID NO: 1788 - RNA, 23 nt, synthetic construct
  misc_feature 1..23: note = Synthetic sequence or unknown origin
  source 1..23: mol_type = other RNA
gactacttaggtagtcatttttt

SEQ ID NO: 1789 - RNA, 16 nt, synthetic construct
  misc_feature 1..16: note = Synthetic sequence or unknown origin
  source 1..16: mol_type = other RNA
gactacttaggtagtc

SEQ ID NO: 1790 - RNA, 17 nt, synthetic construct
  misc_feature 1..17: note = Synthetic sequence or unknown origin
  source 1..17: mol_type = other RNA
gactacttaggtagtca

SEQ ID NO: 1791 - RNA, 108 nt, synthetic construct
  misc_feature 1..108: note = Synthetic sequence or unknown origin
  source 1..108: mol_type = other RNA
gttctagttctatgtcgaaagacatagagagttagaataaaggttctcgtttcgattacccaaaatgcccatttattatgtggccgactacttaggtagtcatttttt

SEQ ID NO: 1792 - RNA, 16 nt, synthetic construct
  misc_feature 1..16: note = Synthetic sequence or unknown origin
  source 1..16: mol_type = other RNA
gttctagttctatgtc

SEQ ID NO: 1793 - RNA, 15 nt, synthetic construct
  misc_feature 1..15: note = Synthetic sequence or unknown origin
  source 1..15: mol_type = other RNA
gttctagttctatgt

SEQ ID NO: 1794 - RNA, 12 nt, synthetic construct
  misc_feature 1..12: note = Synthetic sequence or unknown origin
  source 1..12: mol_type = other RNA
gttctagttcta

SEQ ID NO: 1795 - RNA, 10 nt, synthetic construct
  misc_feature 1..10: note = Synthetic sequence or unknown origin
  source 1..10: mol_type = other RNA
gttctagttc

SEQ ID NO: 1796 - RNA, 18 nt, synthetic construct
  misc_feature 1..18: note = Synthetic sequence or unknown origin
  source 1..18: mol_type = other RNA
gacatagagagttagaat

SEQ ID NO: 1797 - RNA, 17 nt, synthetic construct
  misc_feature 1..17: note = Synthetic sequence or unknown origin
  source 1..17: mol_type = other RNA
acatagagagttagaat

SEQ ID NO: 1798 - RNA, 14 nt, synthetic construct
  misc_feature 1..14: note = Synthetic sequence or unknown origin
  source 1..14: mol_type = other RNA
tagagagttagaat

SEQ ID NO: 1799 - RNA, 12 nt, synthetic construct
  misc_feature 1..12: note = Synthetic sequence or unknown origin
  source 1..12: mol_type = other RNA
gagagttagaat

SEQ ID NO: 1800 - RNA, 28 nt, synthetic construct
  misc_feature 1..28: note = Synthetic sequence or unknown origin
  source 1..28: mol_type = other RNA
aaaggttctcgtttcgattacccaaaat

SEQ ID NO: 1801 - RNA, 22 nt, synthetic construct
  misc_feature 1..22: note = Synthetic sequence or unknown origin
  source 1..22: mol_type = other RNA
aaaggttctcgtttcgattacc

SEQ ID NO: 1802 - RNA, 112 nt, synthetic construct
  misc_feature 1..112: note = Synthetic sequence or unknown origin
  source 1..112: mol_type = other RNA
gtttgagagtagtgtaagaaattacactatgagttcaaataaacttttttcaaatcgccgcttatgcggttcacgctgtgtgaattaagctctcatctgtgggagctttttt

SEQ ID NO: 1803 - RNA, 17 nt, synthetic construct
  misc_feature 1..17: note = Synthetic sequence or unknown origin
  source 1..17: mol_type = other RNA
gtttgagagtagtgtaa

SEQ ID NO: 1804 - RNA, 15 nt, synthetic construct
  misc_feature 1..15: note = Synthetic sequence or unknown origin
  source 1..15: mol_type = other RNA
gtttgagagtagtgt

SEQ ID NO: 1805 - RNA, 12 nt, synthetic construct
  misc_feature 1..12: note = Synthetic sequence or unknown origin
  source 1..12: mol_type = other RNA
gtttgagagtag

SEQ ID NO: 1806 - RNA, 10 nt, synthetic construct
  misc_feature 1..10: note = Synthetic sequence or unknown origin
  source 1..10: mol_type = other RNA
gtttgagagt

SEQ ID NO: 1807 - RNA, 19 nt, synthetic construct
  misc_feature 1..19: note = Synthetic sequence or unknown origin
  source 1..19: mol_type = other RNA
ttacactatgagttcaaat

SEQ ID NO: 1808 - RNA, 17 nt, synthetic construct
  misc_feature 1..17: note = Synthetic sequence or unknown origin
  source 1..17: mol_type = other RNA
acactatgagttcaaat

SEQ ID NO: 1809 - RNA, 14 nt, synthetic construct
  misc_feature 1..14: note = Synthetic sequence or unknown origin
  source 1..14: mol_type = other RNA
ctatgagttcaaat

SEQ ID NO: 1810 - RNA, 12 nt, synthetic construct
  misc_feature 1..12: note = Synthetic sequence or unknown origin
  source 1..12: mol_type = other RNA
atgagttcaaat

SEQ ID NO: 1811 - RNA, 30 nt, synthetic construct
  misc_feature 1..30: note = Synthetic sequence or unknown origin
  source 1..30: mol_type = other RNA
aaacttttttcaaatcgccgcttatgcggt

SEQ ID NO: 1812 - RNA, 30 nt, synthetic construct; identical to SEQ ID NO: 1811
  misc_feature 1..30: note = Synthetic sequence or unknown origin
  source 1..30: mol_type = other RNA

SEQ ID NO: 1813 - RNA, 16 nt, synthetic construct
  misc_feature 1..16: note = Synthetic sequence or unknown origin
  source 1..16: mol_type = other RNA
tcacgctgtgtgaatt

SEQ ID NO: 1814 - RNA, 13 nt, synthetic construct
  misc_feature 1..13: note = Synthetic sequence or unknown origin
  source 1..13: mol_type = other RNA
tcacgctgtgtga

SEQ ID NO: 1815 - RNA, 26 nt, synthetic construct
  misc_feature 1..26: note = Synthetic sequence or unknown origin
  source 1..26: mol_type = other RNA
aagctctcatctgtgggagctttttt

SEQ ID NO: 1816 - RNA, 22 nt, synthetic construct
  misc_feature 1..22: note = Synthetic sequence or unknown origin
  source 1..22: mol_type = other RNA
aagctctcatctgtgggagctt

SEQ ID NO: 1817 - RNA, 20 nt, synthetic construct
  misc_feature 1..20: note = Synthetic sequence or unknown origin
  source 1..20: mol_type = other RNA
aagctctcatctgtgggagc

SEQ ID NO: 1818 - RNA, 112 nt, synthetic construct
  misc_feature 1..112: note = Synthetic sequence or unknown origin
  source 1..112: mol_type = other RNA
gtttgagagtagtgtaagaaattacactatgagttcaaataaacttctttcaaatcgccgcttatgcggttcacgctgtgtgaattaagctctcatctgtgggagctttttt

SEQ ID NO: 1819 - RNA, 30 nt, synthetic construct
  misc_feature 1..30: note = Synthetic sequence or unknown origin
  source 1..30: mol_type = other RNA
aaacttctttcaaatcgccgcttatgcggt

SEQ ID NO: 1820 - RNA, 30 nt, synthetic construct; identical to SEQ ID NO: 1819
  misc_feature 1..30: note = Synthetic sequence or unknown origin
  source 1..30: mol_type = other RNA

SEQ ID NO: 1821 - RNA, 123 nt, synthetic construct
  misc_feature 1..123: note = Synthetic sequence or unknown origin
  source 1..123: mol_type = other RNA
gtttgagagtagtgtaagaaattacactatgagttcaaataaacttttttcaaatcgccgcttatgcggttcacgctgtgtgaattaagctctcatctgtgggagcttttttattgctttttt

SEQ ID NO: 1822 - RNA, 34 nt, synthetic construct
  misc_feature 1..34: note = Synthetic sequence or unknown origin
  source 1..34: mol_type = other RNA
aaacttttttcaaatcgccgcttatgcggttcac

SEQ ID NO: 1823 - RNA, 49 nt, synthetic construct
  misc_feature 1..49: note = Synthetic sequence or unknown origin
  source 1..49: mol_type = other RNA
gctgtgtgaattaagctctcatctgtgggagcttttttattgctttttt

SEQ ID NO: 1824 - RNA, 43 nt, synthetic construct
  misc_feature 1..43: note = Synthetic sequence or unknown origin
  source 1..43: mol_type = other RNA
gctgtgtgaattaagctctcatctgtgggagcttttttattgc

SEQ ID NO: 1825 - RNA, 43 nt, synthetic construct; identical to SEQ ID NO: 1824
  misc_feature 1..43: note = Synthetic sequence or unknown origin
  source 1..43: mol_type = other RNA

SEQ ID NO: 1826 - RNA, 123 nt, synthetic construct
  misc_feature 1..123: note = Synthetic sequence or unknown origin
  source 1..123: mol_type = other RNA
gtttgagagtagtgtaagaaattacactatgagttcaaataaacttctttcaaatcgccgcttatgcggttcacgctgtgtgaattaagctctcatctgtgggagcttctttattgctttttt

SEQ ID NO: 1827 - RNA, 37 nt, synthetic construct
  misc_feature 1..37: note = Synthetic sequence or unknown origin
  source 1..37: mol_type = other RNA
aagctctcatctgtgggagcttctttattgctttttt

SEQ ID NO: 1828 - RNA, 31 nt, synthetic construct
  misc_feature 1..31: note = Synthetic sequence or unknown origin
  source 1..31: mol_type = other RNA
aagctctcatctgtgggagcttctttattgc

SEQ ID NO: 1829 - RNA, 117 nt, synthetic construct
  misc_feature 1..117: note = Synthetic sequence or unknown origin
  source 1..117: mol_type = other RNA
gtttgagagtagtgttggaaacgacactacaagttcaaataaagacttgtccaaatcgtctctttaagaggctccgcatagtgcggatagagaatctacgaaagtagattctttttt

SEQ ID NO: 1830 - RNA, 17 nt, synthetic construct
  misc_feature 1..17: note = Synthetic sequence or unknown origin
  source 1..17: mol_type = other RNA
gtttgagagtagtgttg

SEQ ID NO: 1831 - RNA, 15 nt, synthetic construct
  misc_feature 1..15: note = Synthetic sequence or unknown origin
  source 1..15: mol_type = other RNA
gtttgagagtagtgt

SEQ ID NO: 1832 - RNA, 12 nt, synthetic construct
  misc_feature 1..12: note = Synthetic sequence or unknown origin
  source 1..12: mol_type = other RNA
gtttgagagtag

SEQ ID NO: 1833 - RNA, 10 nt, synthetic construct
  misc_feature 1..10: note = Synthetic sequence or unknown origin
  source 1..10: mol_type = other RNA
gtttgagagt

SEQ ID NO: 1834 - RNA, 19 nt, synthetic construct
  misc_feature 1..19: note = Synthetic sequence or unknown origin
  source 1..19: mol_type = other RNA
cgacactacaagttcaaat

SEQ ID NO: 1835 - RNA, 17 nt, synthetic construct
  misc_feature 1..17: note = Synthetic sequence or unknown origin
  source 1..17: mol_type = other RNA
acactacaagttcaaat

SEQ ID NO: 1836 - RNA, 14 nt, synthetic construct
  misc_feature 1..14: note = Synthetic sequence or unknown origin
  source 1..14: mol_type = other RNA
ctacaagttcaaat

SEQ ID NO: 1837 - RNA, 12 nt, synthetic construct
  misc_feature 1..12: note = Synthetic sequence or unknown origin
  source 1..12: mol_type = other RNA
acaagttcaaat

SEQ ID NO: 1838 - RNA, 32 nt, synthetic construct
  misc_feature 1..32: note = Synthetic sequence or unknown origin
  source 1..32: mol_type = other RNA
aaagacttgtccaaatcgtctctttaagaggc

SEQ ID NO: 1839 - RNA, 32 nt, synthetic construct; identical to SEQ ID NO: 1838
  misc_feature 1..32: note = Synthetic sequence or unknown origin
  source 1..32: mol_type = other RNA

SEQ ID NO: 1840 - RNA, 16 nt, synthetic construct
  misc_feature 1..16: note = Synthetic sequence or unknown origin
  source 1..16: mol_type = other RNA
tccgcatagtgcggat

SEQ ID NO: 1841 - RNA, 15 nt, synthetic construct
  misc_feature 1..15: note = Synthetic sequence or unknown origin
  source 1..15: mol_type = other RNA
tccgcatagtgcgga

SEQ ID NO: 1842 - RNA, 29 nt, synthetic construct
  misc_feature 1..29: note = Synthetic sequence or unknown origin
  source 1..29: mol_type = other RNA
agagaatctacgaaagtagattctttttt

SEQ ID NO: 1843 - RNA, 26 nt, synthetic construct
  misc_feature 1..26: note = Synthetic sequence or unknown origin
  source 1..26: mol_type = other RNA
agagaatctacgaaagtagattcttt

SEQ ID NO: 1844 - RNA, 23 nt, synthetic construct
  misc_feature 1..23: note = Synthetic sequence or unknown origin
  source 1..23: mol_type = other RNA
agagaatctacgaaagtagattc

SEQ ID NO: 1845 - RNA, 119 nt, synthetic construct
  misc_feature 1..119: note = Synthetic sequence or unknown origin
  source 1..119: mol_type = other RNA
gtttgagtatggtgtaagaaattacactattagttcaaataaaattttttcacatcgccgaaattttcggtaacacacgctgtgtgtacatctatccgctttatgtaagcggatttttt

SEQ ID NO: 1846 - RNA, 17 nt, synthetic construct
  misc_feature 1..17: note = Synthetic sequence or unknown origin
  source 1..17: mol_type = other RNA
gtttgagtatggtgtaa

SEQ ID NO: 1847 - RNA, 15 nt, synthetic construct
  misc_feature 1..15: note = Synthetic sequence or unknown origin
  source 1..15: mol_type = other RNA
gtttgagtatggtgt

SEQ ID NO: 1848 - RNA, 12 nt, synthetic construct
  misc_feature 1..12: note = Synthetic sequence or unknown origin
  source 1..12: mol_type = other RNA
gtttgagtatgg

SEQ ID NO: 1849 - RNA, 10 nt, synthetic construct
  misc_feature 1..10: note = Synthetic sequence or unknown origin
  source 1..10: mol_type = other RNA
gtttgagtat

SEQ ID NO: 1850 - RNA, 19 nt, synthetic construct
  misc_feature 1..19: note = Synthetic sequence or unknown origin
  source 1..19: mol_type = other RNA
ttacactattagttcaaat

SEQ ID NO: 1851 - RNA, 17 nt, synthetic construct
  misc_feature 1..17: note = Synthetic sequence or unknown origin
  source 1..17: mol_type = other RNA
acactattagttcaaat

SEQ ID NO: 1852 - RNA, 14 nt, synthetic construct
  misc_feature 1..14: note = Synthetic sequence or unknown origin
  source 1..14: mol_type = other RNA
ctattagttcaaat

SEQ ID NO: 1853 - RNA, 12 nt, synthetic construct
  misc_feature 1..12: note = Synthetic sequence or unknown origin
  source 1..12: mol_type = other RNA
attagttcaaat

SEQ ID NO: 1854 - RNA, 32 nt, synthetic construct
  misc_feature 1..32: note = Synthetic sequence or unknown origin
  source 1..32: mol_type = other RNA
aaaattttttcacatcgccgaaattttcggta

SEQ ID NO: 1855 - RNA, 31 nt, synthetic construct
  misc_feature 1..31: note = Synthetic sequence or unknown origin
  source 1..31: mol_type = other RNA
aaaattttttcacatcgccgaaattttcggt

SEQ ID NO: 1856 - RNA, 21 nt, synthetic construct
  misc_feature 1..21: note = Synthetic sequence or unknown origin
  source 1..21: mol_type = other RNA
acacacgctgtgtgtacatct

SEQ ID NO: 1857 - RNA, 15 nt, synthetic construct
  misc_feature 1..15: note = Synthetic sequence or unknown origin
  source 1..15: mol_type = other RNA
acacacgctgtgtgt

SEQ ID NO: 1858 - RNA, 26 nt, synthetic construct
  misc_feature 1..26: note = Synthetic sequence or unknown origin
  source 1..26: mol_type = other RNA
atccgctttatgtaagcggatttttt

SEQ ID NO: 1859 - RNA, 21 nt, synthetic construct
  misc_feature 1..21: note = Synthetic sequence or unknown origin
  source 1..21: mol_type = other RNA
atccgctttatgtaagcggat

SEQ ID NO: 1860 - RNA, 20 nt, synthetic construct
  misc_feature 1..20: note = Synthetic sequence or unknown origin
  source 1..20: mol_type = other RNA
atccgctttatgtaagcgga

SEQ ID NO: 1861 - RNA, 119 nt, synthetic construct
  misc_feature 1..119: note = Synthetic sequence or unknown origin
  source 1..119: mol_type = other RNA
gtttgagtatggtgtaagaaattacactattagttcaaataaaattctttcacatcgccgaaactttcggtaacacacgctgtgtgtacatctatccgctttatgtaagcggatttttt

SEQ ID NO: 1862 - RNA, 32 nt, synthetic construct
  misc_feature 1..32: note = Synthetic sequence or unknown origin
  source 1..32: mol_type = other RNA
aaaattctttcacatcgccgaaactttcggta

SEQ ID NO: 1863 - RNA, 31 nt, synthetic construct
  misc_feature 1..31: note = Synthetic sequence or unknown origin
  source 1..31: mol_type = other RNA
aaaattctttcacatcgccgaaactttcggt

SEQ ID NO: 1864 - RNA, 92 nt, synthetic construct
  misc_feature 1..92: note = Synthetic sequence or unknown origin
  source 1..92: mol_type = other RNA
gtttgagtatggtgtaagaaattacactattagttcaaataaaattttttcacatcgccgaaattttcggtaacacacgctgtgtgtttttt

SEQ ID NO: 1865 - RNA, 31 nt, synthetic construct; identical to SEQ ID NO: 1855
  misc_feature 1..31: note = Synthetic sequence or unknown origin
  source 1..31: mol_type = other RNA

SEQ ID NO: 1866 - RNA, 21 nt, synthetic construct
  misc_feature 1..21: note = Synthetic sequence or unknown origin
  source 1..21: mol_type = other RNA
aacacacgctgtgtgtttttt

SEQ ID NO: 1867 - RNA, 17 nt, synthetic construct
  misc_feature 1..17: note = Synthetic sequence or unknown origin
  source 1..17: mol_type = other RNA
aacacacgctgtgtgtt

SEQ ID NO: 1868 - RNA, 15 nt, synthetic construct
  misc_feature 1..15: note = Synthetic sequence or unknown origin
  source 1..15: mol_type = other RNA
aacacacgctgtgtg

SEQ ID NO: 1869 - RNA, 92 nt, synthetic construct
  misc_feature 1..92: note = Synthetic sequence or unknown origin
  source 1..92: mol_type = other RNA
gtttgagtatggtgtaagaaattacactattagttcaaataaaattctttcacatcgccgaaactttcggtaacacacgctgtgtgtttttt

SEQ ID NO: 1870 - RNA, 31 nt, synthetic construct; identical to SEQ ID NO: 1863
  misc_feature 1..31: note = Synthetic sequence or unknown origin
  source 1..31: mol_type = other RNA

SEQ ID NO: 1871 - RNA, 94 nt, synthetic construct
  misc_feature 1..94: note = Synthetic sequence or unknown origin
  source 1..94: mol_type = other RNA
gttttagatctatgtcagaaatgacatagagagttaaaataaaggtttaaccctaaatactctatttgagcgactgctttggcagtcttttttt

SEQ ID NO: 1872 - RNA, 17 nt, synthetic construct
  misc_feature 1..17: note = Synthetic sequence or unknown origin
  source 1..17: mol_type = other RNA
gttttagatctatgtca

SEQ ID NO: 1873 - RNA, 15 nt, synthetic construct
  misc_feature 1..15: note = Synthetic sequence or unknown origin
  source 1..15: mol_type = other RNA
gttttagatctatgt

SEQ ID NO: 1874 - RNA, 12 nt, synthetic construct
  misc_feature 1..12: note = Synthetic sequence or unknown origin
  source 1..12: mol_type = other RNA
gttttagatcta

SEQ ID NO: 1875 - RNA, 10 nt, synthetic construct
  misc_feature 1..10: note = Synthetic sequence or unknown origin
  source 1..10: mol_type = other RNA
gttttagatc

SEQ ID NO: 1876 - RNA, 19 nt, synthetic construct
  misc_feature 1..19: note = Synthetic sequence or unknown origin
  source 1..19: mol_type = other RNA
tgacatagagagttaaaat

SEQ ID NO: 1877 - RNA, 17 nt, synthetic construct
  misc_feature 1..17: note = Synthetic sequence or unknown origin
  source 1..17: mol_type = other RNA
acatagagagttaaaat

SEQ ID NO: 1878 - RNA, 14 nt, synthetic construct
  misc_feature 1..14: note = Synthetic sequence or unknown origin
  source 1..14: mol_type = other RNA
tagagagttaaaat

SEQ ID NO: 1879 - RNA, 12 nt, synthetic construct
  misc_feature 1..12: note = Synthetic sequence or unknown origin
  source 1..12: mol_type = other RNA
gagagttaaaat

SEQ ID NO: 1880 - RNA, 19 nt, synthetic construct
  misc_feature 1..19: note = Synthetic sequence or unknown origin
  source 1..19: mol_type = other RNA
aaaggtttaaccctaaata

SEQ ID NO: 1881 - RNA, 14 nt, synthetic construct
  misc_feature 1..14: note = Synthetic sequence or unknown origin
  source 1..14: mol_type = other RNA
aaaggtttaaccct

SEQ ID NO: 1882 - RNA, 12 nt, synthetic construct
  misc_feature 1..12: note = Synthetic sequence or unknown origin
  source 1..12: mol_type = other RNA
ctctatttgagc

SEQ ID NO: 1883 - RNA, 11 nt, synthetic construct
  misc_feature 1..11: note = Synthetic sequence or unknown origin
  source 1..11: mol_type = other RNA
ctctatttgag

SEQ ID NO: 1884 - RNA, 23 nt, synthetic construct
  misc_feature 1..23: note = Synthetic sequence or unknown origin
  source 1..23: mol_type = other RNA
gactgctttggcagtcttttttt

SEQ ID NO: 1885 - RNA, 16 nt, synthetic construct
  misc_feature 1..16: note = Synthetic sequence or unknown origin
  source 1..16: mol_type = other RNA
gactgctttggcagtc

SEQ ID NO: 1886 - RNA, 16 nt, synthetic construct
  misc_feature 1..16: note = Synthetic sequence or unknown origin
  source 1..16: mol_type = other RNA
gactgctttggcagtc

SEQ ID NO: 1887 - RNA, 94 nt, synthetic construct
  misc_feature 1..94: note = Synthetic sequence or unknown origin
  source 1..94: mol_type = other RNA
gttctagatctatgtcagaaatgacatagagagttagaataaaggtttaaccctaaatactctatttgagcgactgctttggcagtcttttttt

SEQ ID NO: 1888 - RNA, 17 nt, synthetic construct
  misc_feature 1..17: note = Synthetic sequence or unknown origin
  source 1..17: mol_type = other RNA
gttctagatctatgtca

SEQ ID NO: 1889 - RNA, 15 nt, synthetic construct
  misc_feature 1..15: note = Synthetic sequence or unknown origin
  source 1..15: mol_type = other RNA
gttctagatctatgt

SEQ ID NO: 1890 - RNA, 12 nt, synthetic construct
  misc_feature 1..12: note = Synthetic sequence or unknown origin
  source 1..12: mol_type = other RNA
gttctagatcta

SEQ ID NO: 1891 - RNA, 10 nt, synthetic construct
  misc_feature 1..10: note = Synthetic sequence or unknown origin
  source 1..10: mol_type = other RNA
gttctagatc

SEQ ID NO: 1892 - RNA, 19 nt, synthetic construct
  misc_feature 1..19: note = Synthetic sequence or unknown origin
  source 1..19: mol_type = other RNA
tgacatagagagttagaat

SEQ ID NO: 1893 - RNA, 17 nt, synthetic construct
  misc_feature 1..17: note = Synthetic sequence or unknown origin
  source 1..17: mol_type = other RNA
acatagagagttagaat

SEQ ID NO: 1894 - RNA, 14 nt, synthetic construct
  misc_feature 1..14: note = Synthetic sequence or unknown origin
  source 1..14: mol_type = other RNA
tagagagttagaat

SEQ ID NO: 1895 - RNA, 12 nt, synthetic construct
  misc_feature 1..12: note = Synthetic sequence or unknown origin
  source 1..12: mol_type = other RNA
gagagttagaat

SEQ ID NO: 1896 - RNA, 114 nt, synthetic construct
  misc_feature 1..114: note = Synthetic sequence or unknown origin
  source 1..114: mol_type = other RNA
gtttgagaatgatgtaagaaattacatcataagttcaaataagaatttattcaaaacgccgtcttagatggcccacagtgtgtggaacaaaaagtctgctatgcagactttttt

SEQ ID NO: 1897 - RNA, 17 nt, synthetic construct
  misc_feature 1..17: note = Synthetic sequence or unknown origin
  source 1..17: mol_type = other RNA
gtttgagaatgatgtaa

SEQ ID NO: 1898 - RNA, 15 nt, synthetic construct
  misc_feature 1..15: note = Synthetic sequence or unknown origin
  source 1..15: mol_type = other RNA
gtttgagaatgatgt

SEQ ID NO: 1899 - RNA, 12 nt, synthetic construct
  misc_feature 1..12: note = Synthetic sequence or unknown origin
  source 1..12: mol_type = other RNA
gtttgagaatga

SEQ ID NO: 1900 - RNA, 10 nt, synthetic construct
  misc_feature 1..10: note = Synthetic sequence or unknown origin
  source 1..10: mol_type = other RNA
gtttgagaat

SEQ ID NO: 1901 - RNA, 19 nt, synthetic construct
  misc_feature 1..19: note = Synthetic sequence or unknown origin
  source 1..19: mol_type = other RNA
ttacatcataagttcaaat

SEQ ID NO: 1902 - RNA, 17 nt, synthetic construct
  misc_feature 1..17: note = Synthetic sequence or unknown origin
  source 1..17: mol_type = other RNA
acatcataagttcaaat

SEQ ID NO: 1903 - RNA, 14 nt, synthetic construct
  misc_feature 1..14: note = Synthetic sequence or unknown origin
  source 1..14: mol_type = other RNA
tcataagttcaaat

SEQ ID NO: 1904 - RNA, 12 nt, synthetic construct
  misc_feature 1..12: note = Synthetic sequence or unknown origin
  source 1..12: mol_type = other RNA
ataagttcaaat

SEQ ID NO: 1905 - RNA, 32 nt, synthetic construct
  misc_feature 1..32: note = Synthetic sequence or unknown origin
  source 1..32: mol_type = other RNA
aagaatttattcaaaacgccgtcttagatggc

SEQ ID NO: 1906 - RNA, 32 nt, synthetic construct; identical to SEQ ID NO: 1905
  misc_feature 1..32: note = Synthetic sequence or unknown origin
  source 1..32: mol_type = other RNA

SEQ ID NO: 1907 - RNA, 16 nt, synthetic construct
  misc_feature 1..16: note = Synthetic sequence or unknown origin
  source 1..16: mol_type = other RNA
ccacagtgtgtggaac

SEQ ID NO: 1908 - RNA, 13 nt, synthetic construct
  misc_feature 1..13: note = Synthetic sequence or unknown origin
  source 1..13: mol_type = other RNA
ccacagtgtgtgg

SEQ ID NO: 1909 - RNA, 26 nt, synthetic construct
  misc_feature 1..26: note = Synthetic sequence or unknown origin
  source 1..26: mol_type = other RNA
aaaaagtctgctatgcagactttttt

SEQ ID NO: 1910 - RNA, 25 nt, synthetic construct
  misc_feature 1..25: note = Synthetic sequence or unknown origin
  source 1..25: mol_type = other RNA
aaaaagtctgctatgcagacttttt

SEQ ID NO: 1911 - RNA, 20 nt, synthetic construct
  misc_feature 1..20: note = Synthetic sequence or unknown origin
  source 1..20: mol_type = other RNA
aaaaagtctgctatgcagac

SEQ ID NO: 1912 - RNA, 115 nt, synthetic construct
  misc_feature 1..115: note = Synthetic sequence or unknown origin
  source 1..115: mol_type = other RNA
gtttgagagtagtgtaagaaattacactacaaagttcaaataagcttttagcgaaatcatcgcaatgcgaatgcacagtgtgtgctcagtaagacctcattacgaggtctttttt

SEQ ID NO: 1913 - RNA, 17 nt, synthetic construct
  misc_feature 1..17: note = Synthetic sequence or unknown origin
  source 1..17: mol_type = other RNA
gtttgagagtagtgtaa

SEQ ID NO: 1914 - RNA, 15 nt, synthetic construct
  misc_feature 1..15: note = Synthetic sequence or unknown origin
  source 1..15: mol_type = other RNA
gtttgagagtagtgt

SEQ ID NO: 1915 - RNA, 12 nt, synthetic construct
  misc_feature 1..12: note = Synthetic sequence or unknown origin
  source 1..12: mol_type = other RNA
gtttgagagtag

SEQ ID NO: 1916 - RNA, 10 nt, synthetic construct
  misc_feature 1..10: note = Synthetic sequence or unknown origin
  source 1..10: mol_type = other RNA
gtttgagagt

SEQ ID NO: 1917 - RNA, 20 nt, synthetic construct
  misc_feature 1..20: note = Synthetic sequence or unknown origin
  source 1..20: mol_type = other RNA
ttacactacaaagttcaaat

SEQ ID NO: 1918 - RNA, 18 nt, synthetic construct
  misc_feature 1..18: note = Synthetic sequence or unknown origin
  source 1..18: mol_type = other RNA
acactacaaagttcaaat

SEQ ID NO: 1919 - RNA, 15 nt, synthetic construct
  misc_feature 1..15: note = Synthetic sequence or unknown origin
  source 1..15: mol_type = other RNA
ctacaaagttcaaat

SEQ ID NO: 1920 - RNA, 13 nt, synthetic construct
  misc_feature 1..13: note = Synthetic sequence or unknown origin
  source 1..13: mol_type = other RNA
acaaagttcaaat

SEQ ID NO: 1921 - RNA, 24 nt, synthetic construct
  misc_feature 1..24: note = Synthetic sequence or unknown origin
  source 1..24: mol_type = other RNA
aagcttttagcgaaatcatcgcaa

SEQ ID NO: 1922 - RNA, 22 nt, synthetic construct
  misc_feature 1..22: note = Synthetic sequence or unknown origin
  source 1..22: mol_type = other RNA
aagcttttagcgaaatcatcgc

SEQ ID NO: 1923 - RNA, 26 nt, synthetic construct
  misc_feature 1..26: note = Synthetic sequence or unknown origin
  source 1..26: mol_type = other RNA
tgcgaatgcacagtgtgtgctcagta

SEQ ID NO: 1924 - RNA, 26 nt, synthetic construct
  misc_feature 1..26: note = Synthetic sequence or unknown origin
  source 1..26: mol_type = other RNA
tgcgaatgcacagtgtgtgctcagta

SEQ ID NO: 1925 - RNA, 24 nt, synthetic construct
  misc_feature 1..24: note = Synthetic sequence or unknown origin
  source 1..24: mol_type = other RNA
agacctcattacgaggtctttttt

SEQ ID NO: 1926 - RNA, 19 nt, synthetic construct
  misc_feature 1..19: note = Synthetic sequence or unknown origin
  source 1..19: mol_type = other RNA
agacctcattacgaggtct

SEQ ID NO: 1927 - RNA, 18 nt, synthetic construct
  misc_feature 1..18: note = Synthetic sequence or unknown origin
  source 1..18: mol_type = other RNA
agacctcattacgaggtc

SEQ ID NO: 1928 - RNA, 115 nt, synthetic construct
  misc_feature 1..115: note = Synthetic sequence or unknown origin
  source 1..115: mol_type = other RNA
gtttgagagtagtgtaagaaattacactacaaagttcaaataagcttctagcgaaatcatcgcaatgcgaatgcacagtgtgtgctcagtaagacctcattacgaggtctttttt

SEQ ID NO: 1929 - RNA, 24 nt, synthetic construct
  misc_feature 1..24: note = Synthetic sequence or unknown origin
  source 1..24: mol_type = other RNA
aagcttctagcgaaatcatcgcaa

SEQ ID NO: 1930 - RNA, 22 nt, synthetic construct
  misc_feature 1..22: note = Synthetic sequence or unknown origin
  source 1..22: mol_type = other RNA
aagcttctagcgaaatcatcgc

SEQ ID NO: 1931 - RNA, 97 nt, synthetic construct
  misc_feature 1..97: note = Synthetic sequence or unknown origin
  source 1..97: mol_type = other RNA
gtttggtagctgtgtgaaaacacagcatgtccaaataaaaacatgttcaaaatgccctatagagggttataaacatccatttagtgggtgttttttt

SEQ ID NO: 1932 - RNA, 15 nt, synthetic construct
  misc_feature 1..15: note = Synthetic sequence or unknown origin
  source 1..15: mol_type = other RNA
gtttggtagctgtgt

SEQ ID NO: 1933 - RNA, 12 nt, synthetic construct
  misc_feature 1..12: note = Synthetic sequence or unknown origin
  source 1..12: mol_type = other RNA
gtttggtagctg

SEQ ID NO: 1934 - RNA, 10 nt, synthetic construct
  misc_feature 1..10: note = Synthetic sequence or unknown origin
  source 1..10: mol_type = other RNA
gtttggtagc

SEQ ID NO: 1935 - RNA, 17 nt, synthetic construct
  misc_feature 1..17: note = Synthetic sequence or unknown origin
  source 1..17: mol_type = other RNA
acacagcatgtccaaat

SEQ ID NO: 1936 - RNA, 14 nt, synthetic construct
  misc_feature 1..14: note = Synthetic sequence or unknown origin
  source 1..14: mol_type = other RNA
cagcatgtccaaat

SEQ ID NO: 1937 - RNA, 12 nt, synthetic construct
  misc_feature 1..12: note = Synthetic sequence or unknown origin
  source 1..12: mol_type = other RNA
gcatgtccaaat

SEQ ID NO: 1938 - RNA, 34 nt, synthetic construct
  misc_feature 1..34: note = Synthetic sequence or unknown origin
  source 1..34: mol_type = other RNA
aaaaacatgttcaaaatgccctatagagggttat

SEQ ID NO: 1939 - RNA, 31 nt, synthetic construct
  misc_feature 1..31: note = Synthetic sequence or unknown origin
  source 1..31: mol_type = other RNA
aaaaacatgttcaaaatgccctatagagggt

SEQ ID NO: 1940 - RNA, 27 nt, synthetic construct
  misc_feature 1..27: note = Synthetic sequence or unknown origin
  source 1..27: mol_type = other RNA
aaacatccatttagtgggtgttttttt

SEQ ID NO: 1941 - RNA, 23 nt, synthetic construct
  misc_feature 1..23: note = Synthetic sequence or unknown origin
  source 1..23: mol_type = other RNA
aaacatccatttagtgggtgttt

SEQ ID NO: 1942 - RNA, 20 nt, synthetic construct
  misc_feature 1..20: note = Synthetic sequence or unknown origin
  source 1..20: mol_type = other RNA
aaacatccatttagtgggtg

SEQ ID NO: 1943 - RNA, 110 nt, synthetic construct
  misc_feature 1..110: note = Synthetic sequence or unknown origin
  source 1..110: mol_type = other RNA
gttttagatgtatgtaagaaattacatgcaaagttaaaataaatgttatactaaatgccttttataggtcccgttttgacgggggagatgccactatcgtggcatttttt

SEQ ID NO: 1944 - RNA, 17 nt, synthetic construct
  misc_feature 1..17: note = Synthetic sequence or unknown origin
  source 1..17: mol_type = other RNA
gttttagatgtatgtaa

SEQ ID NO: 1945 - RNA, 15 nt, synthetic construct
  misc_feature 1..15: note = Synthetic sequence or unknown origin
  source 1..15: mol_type = other RNA
gttttagatgtatgt

SEQ ID NO: 1946 - RNA, 12 nt, synthetic construct
  misc_feature 1..12: note = Synthetic sequence or unknown origin
  source 1..12: mol_type = other RNA
gttttagatgta

SEQ ID NO: 1947 - RNA, 10 nt, synthetic construct
  misc_feature 1..10: note = Synthetic sequence or unknown origin
  source 1..10: mol_type = other RNA
gttttagatg

SEQ ID NO: 1948 - RNA, 19 nt, synthetic construct
  misc_feature 1..19: note = Synthetic sequence or unknown origin
  source 1..19: mol_type = other RNA
ttacatgcaaagttaaaat

SEQ ID NO: 1949 - RNA, 17 nt, synthetic construct
  misc_feature 1..17: note = Synthetic sequence or unknown origin
  source 1..17: mol_type = other RNA
acatgcaaagttaaaat

SEQ ID NO: 1950 - RNA, 14 nt, synthetic construct
  misc_feature 1..14: note = Synthetic sequence or unknown origin
  source 1..14: mol_type = other RNA
tgcaaagttaaaat

SEQ ID NO: 1951 - RNA, 12 nt, synthetic construct
  misc_feature 1..12: note = Synthetic sequence or unknown origin
  source 1..12: mol_type = other RNA
caaagttaaaat

SEQ ID NO: 1952 - RNA, 29 nt, synthetic construct
  misc_feature 1..29: note = Synthetic sequence or unknown origin
  source 1..29: mol_type = other RNA
aaatgttatactaaatgccttttataggt

SEQ ID NO: 1953 - RNA, 29 nt, synthetic construct
  misc_feature 1..29: note = Synthetic sequence or unknown origin
  source 1..29: mol_type = other RNA
aaatgttatactaaatgccttttataggt

SEQ ID NO: 1954 - RNA, 14 nt, synthetic construct
  misc_feature 1..14: note = Synthetic sequence or unknown origin
  source 1..14: mol_type = other RNA
cccgttttgacggg

SEQ ID NO: 1955 - RNA, 14 nt, synthetic construct
  misc_feature 1..14: note = Synthetic sequence or unknown origin
  source 1..14: mol_type = other RNA
cccgttttgacggg

SEQ ID NO: 1956 - RNA, 27 nt, synthetic construct
  misc_feature 1..27: note = Synthetic sequence or unknown origin
  source 1..27: mol_type = other RNA
ggagatgccactatcgtggcatttttt

SEQ ID NO: 1957 - RNA, 26 nt, synthetic construct
  misc_feature 1..26: note = Synthetic sequence or unknown origin
  source 1..26: mol_type = other RNA
ggagatgccactatcgtggcattttt

SEQ ID NO: 1958 - RNA, 21 nt, synthetic construct
  misc_feature 1..21: note = Synthetic sequence or unknown origin
  source 1..21: mol_type = other RNA
ggagatgccactatcgtggca

SEQ ID NO: 1959 - RNA, 110 nt, synthetic construct
  misc_feature 1..110: note = Synthetic sequence or unknown origin
  source 1..110: mol_type = other RNA
gttctagatgtatgtaagaaattacatgcaaagttagaataaatgttatactaaatgcctttcataggtcccgtttcgacgggggagatgccactatcgtggcatttttt

SEQ ID NO: 1960 - RNA, 17 nt, synthetic construct
  misc_feature 1..17: note = Synthetic sequence or unknown origin
  source 1..17: mol_type = other RNA
gttctagatgtatgtaa

SEQ ID NO: 1961 - RNA, 15 nt, synthetic construct
  misc_feature 1..15: note = Synthetic sequence or unknown origin
  source 1..15: mol_type = other RNA
gttctagatgtatgt

SEQ ID NO: 1962 - RNA, 12 nt, synthetic construct
  misc_feature 1..12: note = Synthetic sequence or unknown origin
  source 1..12: mol_type = other RNA
gttctagatgta

SEQ ID NO: 1963 - RNA, 10 nt, synthetic construct
  misc_feature 1..10: note = Synthetic sequence or unknown origin
  source 1..10: mol_type = other RNA
gttctagatg

SEQ ID NO: 1964 - RNA, 19 nt, synthetic construct
  misc_feature 1..19: note = Synthetic sequence or unknown origin
  source 1..19: mol_type = other RNA
ttacatgcaaagttagaat

SEQ ID NO: 1965 - RNA, 17 nt, synthetic construct
  misc_feature 1..17: note = Synthetic sequence or unknown origin
  source 1..17: mol_type = other RNA
acatgcaaagttagaat

SEQ ID NO: 1966 - RNA, 14 nt, synthetic construct
  misc_feature 1..14: note = Synthetic sequence or unknown origin
  source 1..14: mol_type = other RNA
tgcaaagttagaat

SEQ ID NO: 1967 - RNA, 12 nt, synthetic construct
  misc_feature 1..12: note = Synthetic sequence or unknown origin
  source 1..12: mol_type = other RNA
caaagttagaat

SEQ ID NO: 1968 - RNA, 29 nt, synthetic construct
  misc_feature 1..29: note = Synthetic sequence or unknown origin
  source 1..29: mol_type = other RNA
aaatgttatactaaatgcctttcataggt

SEQ ID NO: 1969 - RNA, 29 nt, synthetic construct
  misc_feature 1..29: note = Synthetic sequence or unknown origin
  source 1..29: mol_type = other RNA
aaatgttatactaaatgcctttcataggt

SEQ ID NO: 1970 - RNA, 14 nt, synthetic construct
  misc_feature 1..14: note = Synthetic sequence or unknown origin
  source 1..14: mol_type = other RNA
cccgtttcgacggg

SEQ ID NO: 1971 - RNA, 14 nt, synthetic construct
  misc_feature 1..14: note = Synthetic sequence or unknown origin
  source 1..14: mol_type = other RNA
cccgtttcgacggg

SEQ ID NO: 1972 - RNA, 115 nt, synthetic construct
  misc_feature 1..115: note = Synthetic sequence or unknown origin
  source 1..115: mol_type = other RNA
gtttgagaaccttgtaagaaattacaaggtgagtgcaaataaggatttttccgaaatcgctcatttatatgagtccgcatggtgcggttaaaagacctatttttaggtctttttt

SEQ ID NO: 1973 - RNA, 17 nt, synthetic construct
  misc_feature 1..17: note = Synthetic sequence or unknown origin
  source 1..17: mol_type = other RNA
gtttgagaaccttgtaa

SEQ ID NO: 1974 - RNA, 15 nt, synthetic construct
  misc_feature 1..15: note = Synthetic sequence or unknown origin
  source 1..15: mol_type = other RNA
gtttgagaaccttgt

SEQ ID NO: 1975 - RNA, 12 nt, synthetic construct
  misc_feature 1..12: note = Synthetic sequence or unknown origin
  source 1..12: mol_type = other RNA
gtttgagaacct

SEQ ID NO: 1976 - RNA, 10 nt, synthetic construct
  misc_feature 1..10: note = Synthetic sequence or unknown origin
  source 1..10: mol_type = other RNA
gtttgagaac

SEQ ID NO: 1977 - RNA, 19 nt, synthetic construct
  misc_feature 1..19: note = Synthetic sequence or unknown origin
  source 1..19: mol_type = other RNA
ttacaaggtgagtgcaaat

SEQ ID NO: 1978 - RNA, 17 nt, synthetic construct
  misc_feature 1..17: note = Synthetic sequence or unknown origin
  source 1..17: mol_type = other RNA
acaaggtgagtgcaaat

SEQ ID NO: 1979 - RNA, 14 nt, synthetic construct
  misc_feature 1..14: note = Synthetic sequence or unknown origin
  source 1..14: mol_type = other RNA
aggtgagtgcaaat

SEQ ID NO: 1980 - RNA, 12 nt, synthetic construct
  misc_feature 1..12: note = Synthetic sequence or unknown origin
  source 1..12: mol_type = other RNA
gtgagtgcaaat

SEQ ID NO: 1981 - RNA, 18 nt, synthetic construct
  misc_feature 1..18: note = Synthetic sequence or unknown origin
  source 1..18: mol_type = other RNA
aaggatttttccgaaatc

SEQ ID NO: 1982 - RNA, 12 nt, synthetic construct
  misc_feature 1..12: note = Synthetic sequence or unknown origin
  source 1..12: mol_type = other RNA
aaggatttttcc

SEQ ID NO: 1983 - RNA, 16 nt, synthetic construct
  misc_feature 1..16: note = Synthetic sequence or unknown origin
  source 1..16: mol_type = other RNA
gctcatttatatgagt

SEQ ID NO: 1984 - RNA, 16 nt, synthetic construct
  misc_feature 1..16: note = Synthetic sequence or unknown origin
  source 1..16: mol_type = other RNA
gctcatttatatgagt

SEQ ID NO: 1985 - RNA, 15 nt, synthetic construct
  misc_feature 1..15: note = Synthetic sequence or unknown origin
  source 1..15: mol_type = other RNA
ccgcatggtgcggtt

SEQ ID NO: 1986 - RNA, 13 nt, synthetic construct
  misc_feature 1..13: note = Synthetic sequence or unknown origin
  source 1..13: mol_type = other RNA
ccgcatggtgcgg

SEQ ID NO: 1987 - RNA, 26 nt, synthetic construct
  misc_feature 1..26: note = Synthetic sequence or unknown origin
  source 1..26: mol_type = other RNA
aaaagacctatttttaggtctttttt

SEQ ID NO: 1988 - RNA, 24 nt, synthetic construct
  misc_feature 1..24: note = Synthetic sequence or unknown origin
  source 1..24: mol_type = other RNA
aaaagacctatttttaggtctttt

SEQ ID NO: 1989 - RNA, 20 nt, synthetic construct
  misc_feature 1..20: note = Synthetic sequence or unknown origin
  source 1..20: mol_type = other RNA
aaaagacctatttttaggtc

SEQ ID NO: 1990 - RNA, 115 nt, synthetic construct
  misc_feature 1..115: note = Synthetic sequence or unknown origin
  source 1..115: mol_type = other RNA
gtttgagaaccttgtaagaaattacaaggtgagtgcaaataaggattcttccgaaatcgctcatttatatgagtccgcatggtgcggttaaaagacctattcttaggtctttttt

SEQ ID NO: 1991 - RNA, 18 nt, synthetic construct
  misc_feature 1..18: note = Synthetic sequence or unknown origin
  source 1..18: mol_type = other RNA
aaggattcttccgaaatc

SEQ ID NO: 1992 - RNA, 12 nt, synthetic construct
  misc_feature 1..12: note = Synthetic sequence or unknown origin
  source 1..12: mol_type = other RNA
aaggattcttcc

SEQ ID NO: 1993 - RNA, 26 nt, synthetic construct
  misc_feature 1..26: note = Synthetic sequence or unknown origin
  source 1..26: mol_type = other RNA
aaaagacctattcttaggtctttttt

SEQ ID NO: 1994 - RNA, 24 nt, synthetic construct
  misc_feature 1..24: note = Synthetic sequence or unknown origin
  source 1..24: mol_type = other RNA
aaaagacctattcttaggtctttt

SEQ ID NO: 1995 - RNA, 20 nt, synthetic construct
  misc_feature 1..20: note = Synthetic sequence or unknown origin
  source 1..20: mol_type = other RNA
aaaagacctattcttaggtc

SEQ ID NO: 1996 - RNA, 105 nt, synthetic construct
  misc_feature 1..105: note = Synthetic sequence or unknown origin
  source 1..105: mol_type = other RNA
gtttgagaaccttgtaagaaattacaaggtgagtgcaaataaggatttttccgaaatcgctcatttatatgagtccgcatggtgcggttaaaagacctatttttt

SEQ ID NO: 1997 - RNA, 31 nt, synthetic construct
  misc_feature 1..31: note = Synthetic sequence or unknown origin
  source 1..31: mol_type = other RNA
ccgcatggtgcggttaaaagacctatttttt

SEQ ID NO: 1998 - RNA, 25 nt, synthetic construct
  misc_feature 1..25: note = Synthetic sequence or unknown origin
  source 1..25: mol_type = other RNA
ccgcatggtgcggttaaaagaccta

SEQ ID NO: 1999 - RNA, 105 nt, synthetic construct
  misc_feature 1..105: note = Synthetic sequence or unknown origin
  source 1..105: mol_type = other RNA
gtttgagaaccttgtaagaaattacaaggtgagtgcaaataaggattcttccgaaatcgctcatttatatgagtccgcatggtgcggttaaaagacctatttttt

SEQ ID NO: 2000 - RNA, 111 nt, synthetic construct
  misc_feature 1..111: note = Synthetic sequence or unknown origin
  source 1..111: mol_type = other RNA
gtttgagagtagtgtgagaaatcacactacgagttcaaataaagatttttccaaatcgccggtttgccggccgcacattggtgctaaaaaagatccttcgggatctttttt

SEQ ID NO: 2001 - RNA, 17 nt, synthetic construct
  misc_feature 1..17: note = Synthetic sequence or unknown origin
  source 1..17: mol_type = other RNA
gtttgagagtagtgtga

SEQ ID NO: 2002 - RNA, 15 nt, synthetic construct
  misc_feature 1..15: note = Synthetic sequence or unknown origin
  source 1..15: mol_type = other RNA
gtttgagagtagtgt

SEQ ID NO: 2003 - RNA, 12 nt, synthetic construct
  misc_feature 1..12: note = Synthetic sequence or unknown origin
  source 1..12: mol_type = other RNA
gtttgagagtag

SEQ ID NO: 2004 - RNA, 10 nt, synthetic construct
  misc_feature 1..10: note = Synthetic sequence or unknown origin
  source 1..10: mol_type = other RNA
gtttgagagt

SEQ ID NO: 2005 - RNA, 19 nt, synthetic construct
  misc_feature 1..19: note = Synthetic sequence or unknown origin
  source 1..19: mol_type = other RNA
tcacactacgagttcaaat

SEQ ID NO: 2006 - RNA, 17 nt, synthetic construct
  misc_feature 1..17: note = Synthetic sequence or unknown origin
  source 1..17: mol_type = other RNA
acactacgagttcaaat

SEQ ID NO: 2007 - RNA, 14 nt, synthetic construct
  misc_feature 1..14: note = Synthetic sequence or unknown origin
  source 1..14: mol_type = other RNA
ctacgagttcaaat

SEQ ID NO: 2008 - RNA, 12 nt, synthetic construct
  misc_feature 1..12: note = Synthetic sequence or unknown origin
  source 1..12: mol_type = other RNA
acgagttcaaat

SEQ ID NO: 2009 - RNA, 17 nt, synthetic construct
  misc_feature 1..17: note = Synthetic sequence or unknown origin
  source 1..17: mol_type = other RNA
aaagatttttccaaatc

SEQ ID NO: 2010 - RNA, 17 nt, synthetic construct
  misc_feature 1..17: note = Synthetic sequence or unknown origin
  source 1..17: mol_type = other RNA
aaagatttttccaaatc

SEQ ID NO: 2011 - RNA, 15 nt, synthetic construct
  misc_feature 1..15: note = Synthetic sequence or unknown origin
  source 1..15: mol_type = other RNA
gccggtttgccggcc

SEQ ID NO: 2012 - RNA, 14 nt, synthetic construct
  misc_feature 1..14: note = Synthetic sequence or unknown origin
  source 1..14: mol_type = other RNA
gccggtttgccggc

SEQ ID NO: 2013 - RNA, 13 nt, synthetic construct
  misc_feature 1..13: note = Synthetic sequence or unknown origin
  source 1..13: mol_type = other RNA
gcacattggtgct

SEQ ID NO: 2014 - RNA, 12 nt, synthetic construct
  misc_feature 1..12: note = Synthetic sequence or unknown origin
  source 1..12: mol_type = other RNA
gcacattggtgc

SEQ ID NO: 2015 - RNA, 26 nt, synthetic construct
  misc_feature 1..26: note = Synthetic sequence or unknown origin
  source 1..26: mol_type = other RNA
aaaaaagatccttcgggatctttttt

SEQ ID NO: 2016 - RNA, 26 nt, synthetic construct
  misc_feature 1..26: note = Synthetic sequence or unknown origin
  source 1..26: mol_type = other RNA
aaaaaagatccttcgggatctttttt

SEQ ID NO: 2017 - RNA, 20 nt, synthetic construct
  misc_feature 1..20: note = Synthetic sequence or unknown origin
  source 1..20: mol_type = other RNA
aaaaaagatccttcgggatc

SEQ ID NO: 2018 - RNA, 111 nt, synthetic construct
  misc_feature 1..111: note = Synthetic sequence or unknown origin
  source 1..111: mol_type = other RNA
gtttgagagtagtgtgagaaatcacactacgagttcaaataaagatttctccaaatcgccggtttgccggccgcacattggtgctaaaaaagatccttcgggatctttttt

SEQ ID NO: 2019 - RNA, 17 nt, synthetic construct
  misc_feature 1..17: note = Synthetic sequence or unknown origin
  source 1..17: mol_type = other RNA
aaagatttctccaaatc

SEQ ID NO: 2020 - RNA, 17 nt, synthetic construct
  misc_feature 1..17: note = Synthetic sequence or unknown origin
  source 1..17: mol_type = other RNA
aaagatttctccaaatc

SEQ ID NO: 2021 - RNA, 78 nt, synthetic construct
  misc_feature 1..78: note = Synthetic sequence or unknown origin
  source 1..78: mol_type = other RNA
gtttgagagtagtgtgagaaatcacactacgagttcaaataaagatttttccaaatcgccggtttgccggcctttttt

SEQ ID NO: 2022 - RNA, 21 nt, synthetic construct
  misc_feature 1..21: note = Synthetic sequence or unknown origin
  source 1..21: mol_type = other RNA
gccggtttgccggcctttttt

SEQ ID NO: 2023 - RNA, 15 nt, synthetic construct
  misc_feature 1..15: note = Synthetic sequence or unknown origin
  source 1..15: mol_type = other RNA
gccggtttgccggcc

SEQ ID NO: 2024 - RNA, 78 nt, synthetic construct
  misc_feature 1..78: note = Synthetic sequence or unknown origin
  source 1..78: mol_type = other RNA
gtttgagagtagtgtgagaaatcacactacgagttcaaataaagatttctccaaatcgccggtttgccggcctttttt

SEQ ID NO: 2025 - RNA, 109 nt, synthetic construct
  misc_feature 1..109: note = Synthetic sequence or unknown origin
  source 1..109: mol_type = other RNA
gtttgagagccttgttagaaataacaaggcgagtgcaaataaggattattccgaaatcgtctattgacgctacatggtgtagcatttaaagtccgaaaggacttttttt

SEQ ID NO: 2026 - RNA, 17 nt, synthetic construct
  misc_feature 1..17: note = Synthetic sequence or unknown origin
  source 1..17: mol_type = other RNA
gtttgagagccttgtta

SEQ ID NO: 2027 - RNA, 15 nt, synthetic construct
  misc_feature 1..15: note = Synthetic sequence or unknown origin
  source 1..15: mol_type = other RNA
gtttgagagccttgt

SEQ ID NO: 2028 - RNA, 12 nt, synthetic construct
  misc_feature 1..12: note = Synthetic sequence or unknown origin
  source 1..12: mol_type = other RNA
gtttgagagcct

SEQ ID NO: 2029 - RNA, 10 nt, synthetic construct
  misc_feature 1..10: note = Synthetic sequence or unknown origin
  source 1..10: mol_type = other RNA
gtttgagagc

SEQ ID NO: 2030 - RNA, 19 nt, synthetic construct
  misc_feature 1..19: note = Synthetic sequence or unknown origin
  source 1..19: mol_type = other RNA
taacaaggcgagtgcaaat

SEQ ID NO: 2031 - RNA, 17 nt, synthetic construct
  misc_feature 1..17: note = Synthetic sequence or unknown origin
  source 1..17: mol_type = other RNA
acaaggcgagtgcaaat

SEQ ID NO: 2032 - RNA, 14 nt, synthetic construct
  misc_feature 1..14: note = Synthetic sequence or unknown origin
  source 1..14: mol_type = other RNA
aggcgagtgcaaat

SEQ ID NO: 2033 - RNA, 12 nt, synthetic construct
  misc_feature 1..12: note = Synthetic sequence or unknown origin
  source 1..12: mol_type = other RNA
gcgagtgcaaat

SEQ ID NO: 2034 - RNA, 18 nt, synthetic construct
  misc_feature 1..18: note = Synthetic sequence or unknown origin
  source 1..18: mol_type = other RNA
aaggattattccgaaatc

SEQ ID NO: 2035 - RNA, 12 nt, synthetic construct
  misc_feature 1..12: note = Synthetic sequence or unknown origin
  source 1..12: mol_type = other RNA
aaggattattcc

SEQ ID NO: 2036 - RNA, 10 nt, synthetic construct
  misc_feature 1..10: note = Synthetic sequence or unknown origin
  source 1..10: mol_type = other RNA
gtctattgac

SEQ ID NO: 2037 - RNA, 10 nt, synthetic construct
  misc_feature 1..10: note = Synthetic sequence or unknown origin
  source 1..10: mol_type = other RNA
gtctattgac

SEQ ID NO: 2038 - RNA, 19 nt, synthetic construct
  misc_feature 1..19: note = Synthetic sequence or unknown origin
  source 1..19: mol_type = other RNA
gctacatggtgtagcattt

SEQ ID NO: 2039 - RNA, 15 nt, synthetic construct
  misc_feature 1..15: note = Synthetic sequence or unknown origin
  source 1..15: mol_type = other RNA
gctacatggtgtagc

SEQ ID NO: 2040 - RNA, 22 nt, synthetic construct
  misc_feature 1..22: note = Synthetic sequence or unknown origin
  source 1..22: mol_type = other RNA
aaagtccgaaaggacttttttt

SEQ ID NO: 2041 - RNA, 18 nt, synthetic construct
  misc_feature 1..18: note = Synthetic sequence or unknown origin
  source 1..18: mol_type = other RNA
aaagtccgaaaggacttt

SEQ ID NO: 2042 - RNA, 15 nt, synthetic construct
  misc_feature 1..15: note = Synthetic sequence or unknown origin
  source 1..15: mol_type = other RNA
aaagtccgaaaggac

SEQ ID NO: 2043 - RNA, 90 nt, synthetic construct
  misc_feature 1..90: note = Synthetic sequence or unknown origin
  source 1..90: mol_type = other RNA
gtttgagagccttgttagaaataacaaggcgagtgcaaataaggattattccgaaatcgtctattgacgctacatggtgtagcatttttt

SEQ ID NO: 2044 - RNA, 22 nt, synthetic construct
  misc_feature 1..22: note = Synthetic sequence or unknown origin
  source 1..22: mol_type = other RNA
gctacatggtgtagcatttttt

SEQ ID NO: 2045 - RNA, 16 nt, synthetic construct
  misc_feature 1..16: note = Synthetic sequence or unknown origin
  source 1..16: mol_type = other RNA
gctacatggtgtagca

SEQ ID NO: 2046 - RNA, 113 nt, synthetic construct
  misc_feature 1..113: note = Synthetic sequence or unknown origin
  source 1..113: mol_type = other RNA
gtttgagagtagtgtaagaaattacactacgcgttcaaataaagatttatccaaatcgccgggcaaccggttgcacagtgtgtgcgaaaaaggtctcttcggaggcctttttt

SEQ ID NO: 2047 - RNA, 17 nt, synthetic construct
  misc_feature 1..17: note = Synthetic sequence or unknown origin
  source 1..17: mol_type = other RNA
gtttgagagtagtgtaa

SEQ ID NO: 2048 - RNA, 15 nt, synthetic construct
  misc_feature 1..15: note = Synthetic sequence or unknown origin
  source 1..15: mol_type = other RNA
gtttgagagtagtgt

SEQ ID NO: 2049 - RNA, 12 nt, synthetic construct
  misc_feature 1..12: note = Synthetic sequence or unknown origin
  source 1..12: mol_type = other RNA
gtttgagagtag

SEQ ID NO: 2050 - RNA, 10 nt, synthetic construct
  misc_feature 1..10: note = Synthetic sequence or unknown origin
  source 1..10: mol_type = other RNA
gtttgagagt

SEQ ID NO: 2051 - RNA, 19 nt, synthetic construct
  misc_feature 1..19: note = Synthetic sequence or unknown origin
  source 1..19: mol_type = other RNA
ttacactacgcgttcaaat

SEQ ID NO: 2052 - RNA, 17 nt, synthetic construct
  misc_feature 1..17: note = Synthetic sequence or unknown origin
  source 1..17: mol_type = other RNA
acactacgcgttcaaat

SEQ ID NO: 2053 - RNA, 14 nt, synthetic construct
  misc_feature 1..14: note = Synthetic sequence or unknown origin
  source 1..14: mol_type = other RNA
ctacgcgttcaaat

SEQ ID NO: 2054 - RNA, 12 nt, synthetic construct
  misc_feature 1..12: note = Synthetic sequence or unknown origin
  source 1..12: mol_type = other RNA
acgcgttcaaat

SEQ ID NO: 2055 - RNA, 17 nt, synthetic construct
  misc_feature 1..17: note = Synthetic sequence or unknown origin
  source 1..17: mol_type = other RNA
aaagatttatccaaatc

SEQ ID NO: 2056 - RNA, 17 nt, synthetic construct
  misc_feature 1..17: note = Synthetic sequence or unknown origin
  source 1..17: mol_type = other RNA
aaagatttatccaaatc

SEQ ID NO: 2057 - RNA, 15 nt, synthetic construct
  misc_feature 1..15: note = Synthetic sequence or unknown origin
  source 1..15: mol_type = other RNA
gccgggcaaccggtt

SEQ ID NO: 2058 - RNA, 14 nt, synthetic construct
  misc_feature 1..14: note = Synthetic sequence or unknown origin
  source 1..14: mol_type = other RNA
gccgggcaaccggt

SEQ ID NO: 2059 - RNA, 13 nt, synthetic construct
  misc_feature 1..13: note = Synthetic sequence or unknown origin
  source 1..13: mol_type = other RNA
gcacagtgtgtgc

SEQ ID NO: 2060 - RNA, 13 nt, synthetic construct
  misc_feature 1..13: note = Synthetic sequence or unknown origin
  source 1..13: mol_type = other RNA
gcacagtgtgtgc

SEQ ID NO: 2061 - RNA, 28 nt, synthetic construct
  misc_feature 1..28: note = Synthetic sequence or unknown origin
  source 1..28: mol_type = other RNA
gaaaaaggtctcttcggaggcctttttt

SEQ ID NO: 2062 - RNA, 28 nt, synthetic construct
  misc_feature 1..28: note = Synthetic sequence or unknown origin
  source 1..28: mol_type = other RNA
gaaaaaggtctcttcggaggcctttttt

SEQ ID NO: 2063 - RNA, 22 nt, synthetic construct
  misc_feature 1..22: note = Synthetic sequence or unknown origin
  source 1..22: mol_type = other RNA
gaaaaaggtctcttcggaggcc

SEQ ID NO: 2064 - RNA, 113 nt, synthetic construct
  misc_feature 1..113: note = Synthetic sequence or unknown origin
  source 1..113: mol_type = other RNA
gtttgagagctgtgtaagaaattacacagcaagttcaaataagatttttcgaaatcgccgattcattcggccgcacaggtgtgcgatcttggatgccgtaaggcatctttttt

SEQ ID NO: 2065 - RNA, 17 nt, synthetic construct
  misc_feature 1..17: note = Synthetic sequence or unknown origin
  source 1..17: mol_type = other RNA
gtttgagagctgtgtaa

SEQ ID NO: 2066 - RNA, 15 nt, synthetic construct
  misc_feature 1..15: note = Synthetic sequence or unknown origin
  source 1..15: mol_type = other RNA
gtttgagagctgtgt

SEQ ID NO: 2067 - RNA, 12 nt, synthetic construct
  misc_feature 1..12: note = Synthetic sequence or unknown origin
  source 1..12: mol_type = other RNA
gtttgagagctg

SEQ ID NO: 2068 - RNA, 10 nt, synthetic construct
  misc_feature 1..10: note = Synthetic sequence or unknown origin
  source 1..10: mol_type = other RNA
gtttgagagc

SEQ ID NO: 2069 - RNA, 19 nt, synthetic construct
  misc_feature 1..19: note = Synthetic sequence or unknown origin
  source 1..19: mol_type = other RNA
ttacacagcaagttcaaat

SEQ ID NO: 2070 - RNA, 17 nt, synthetic construct
  misc_feature 1..17: note = Synthetic sequence or unknown origin
  source 1..17: mol_type = other RNA
acacagcaagttcaaat

SEQ ID NO: 2071 - RNA, 14 nt, synthetic construct
  misc_feature 1..14: note = Synthetic sequence or unknown origin
  source 1..14: mol_type = other RNA
cagcaagttcaaat

SEQ ID NO: 2072 - RNA, 12 nt, synthetic construct
  misc_feature 1..12: note = Synthetic sequence or unknown origin
  source 1..12: mol_type = other RNA
gcaagttcaaat

SEQ ID NO: 2073 - RNA, 16 nt, synthetic construct
  misc_feature 1..16: note = Synthetic sequence or unknown origin
  source 1..16: mol_type = other RNA
aagatttttcgaaatc

SEQ ID NO: 2074 - RNA, 16 nt, synthetic construct
  misc_feature 1..16: note = Synthetic sequence or unknown origin
  source 1..16: mol_type = other RNA
aagatttttcgaaatc

SEQ ID NO: 2075 - RNA, 15 nt, synthetic construct
  misc_feature 1..15: note = Synthetic sequence or unknown origin
  source 1..15: mol_type = other RNA
gccgattcattcggc

SEQ ID NO: 2076 - RNA, 15 nt, synthetic construct
  misc_feature 1..15: note = Synthetic sequence or unknown origin
  source 1..15: mol_type = other RNA
gccgattcattcggc

SEQ ID NO: 2077 - RNA, 19 nt, synthetic construct
  misc_feature 1..19: note = Synthetic sequence or unknown origin
  source 1..19: mol_type = other RNA
cgcacaggtgtgcgatctt

SEQ ID NO: 2078 - RNA, 14 nt, synthetic construct
  misc_feature 1..14: note = Synthetic sequence or unknown origin
  source 1..14: mol_type = other RNA
cgcacaggtgtgcg

SEQ ID NO: 2079 - RNA, 23 nt, synthetic construct
  misc_feature 1..23: note = Synthetic sequence or unknown origin
  source 1..23: mol_type = other RNA
ggatgccgtaaggcatctttttt

SEQ ID NO: 2080 - RNA, 18 nt, synthetic construct
  misc_feature 1..18: note = Synthetic sequence or unknown origin
  source 1..18: mol_type = other RNA
ggatgccgtaaggcatct

SEQ ID NO: 2081 - RNA, 17 nt, synthetic construct
  misc_feature 1..17: note = Synthetic sequence or unknown origin
  source 1..17: mol_type = other RNA
ggatgccgtaaggcatc

SEQ ID NO: 2082 - RNA, 113 nt, synthetic construct
  misc_feature 1..113: note = Synthetic sequence or unknown origin
  source 1..113: mol_type = other RNA
gtttgagagctgtgtaagaaattacacagcaagttcaaataagatttctcgaaatcgccgattcattcggccgcacaggtgtgcgatcttggatgccgtaaggcatctttttt

SEQ ID NO: 2083 - RNA, 16 nt, synthetic construct
  misc_feature 1..16: note = Synthetic sequence or unknown origin
  source 1..16: mol_type = other RNA
aagatttctcgaaatc

SEQ ID NO: 2084 - RNA, 16 nt, synthetic construct
  misc_feature 1..16: note = Synthetic sequence or unknown origin
  source 1..16: mol_type = other RNA
aagatttctcgaaatc

SEQ ID NO: 2085 - RNA, 77 nt, synthetic construct
  misc_feature 1..77: note = Synthetic sequence or unknown origin
  source 1..77: mol_type = other RNA
gtttgagagctgtgtaagaaattacacagcaagttcaaataagatttttcgaaatcgccgattcattcggctttttt

SEQ ID NO: 2086 - RNA, 21 nt, synthetic construct
  misc_feature 1..21: note = Synthetic sequence or unknown origin
  source 1..21: mol_type = other RNA
gccgattcattcggctttttt

SEQ ID NO: 2087 - RNA, 15 nt, synthetic construct
  misc_feature 1..15: note = Synthetic sequence or unknown origin
  source 1..15: mol_type = other RNA
gccgattcattcggc

SEQ ID NO: 2088 - RNA, 77 nt, synthetic construct
  misc_feature 1..77: note = Synthetic sequence or unknown origin
  source 1..77: mol_type = other RNA
gtttgagagctgtgtaagaaattacacagcaagttcaaataagatttctcgaaatcgccgattcattcggctttttt

SEQ ID NO: 2089 - RNA, 118 nt, synthetic construct
  misc_feature 1..118: note = Synthetic sequence or unknown origin
  source 1..118: mol_type = other RNA
gtttgagagtcttgtaagaaattacaagacgagtgcaaataaggatttatccgaaaccgtcgtaatgacgccccatggtggggcatttaaaaagattacgcctagcgtagtctttttt

SEQ ID NO: 2090 - RNA, 17 nt, synthetic construct
  misc_feature 1..17: note = Synthetic sequence or unknown origin
  source 1..17: mol_type = other RNA
gtttgagagtcttgtaa

SEQ ID NO: 2091 - RNA, 15 nt, synthetic construct
  misc_feature 1..15: note = Synthetic sequence or unknown origin
  source 1..15: mol_type = other RNA
gtttgagagtcttgt

SEQ ID NO: 2092 - RNA, 12 nt, synthetic construct
  misc_feature 1..12: note = Synthetic sequence or unknown origin
  source 1..12: mol_type = other RNA
gtttgagagtct

SEQ ID NO: 2093 - RNA, 10 nt, synthetic construct
  misc_feature 1..10: note = Synthetic sequence or unknown origin
  source 1..10: mol_type = other RNA
gtttgagagt

SEQ ID NO: 2094 - RNA, 19 nt, synthetic construct
  misc_feature 1..19: note = Synthetic sequence or unknown origin
  source 1..19: mol_type = other RNA
ttacaagacgagtgcaaat

SEQ ID NO: 2095 - RNA, 17 nt, synthetic construct
  misc_feature 1..17: note = Synthetic sequence or unknown origin
  source 1..17: mol_type = other RNA
acaagacgagtgcaaat

SEQ ID NO: 2096 - RNA, 14 nt, synthetic construct
  misc_feature 1..14: note = Synthetic sequence or unknown origin
  source 1..14: mol_type = other RNA
agacgagtgcaaat

SEQ ID NO: 2097 - RNA, 12 nt, synthetic construct
  misc_feature 1..12: note = Synthetic sequence or unknown origin
  source 1..12: mol_type = other RNA
acgagtgcaaat

SEQ ID NO: 2098 - RNA, 18 nt, synthetic construct
  misc_feature 1..18: note = Synthetic sequence or unknown origin
  source 1..18: mol_type = other RNA
aaggatttatccgaaacc

SEQ ID NO: 2099 - RNA, 12 nt, synthetic construct
  misc_feature 1..12: note = Synthetic sequence or unknown origin
  source 1..12: mol_type = other RNA
aaggatttatcc

SEQ ID NO: 2100 - RNA, 11 nt, synthetic construct
  misc_feature 1..11: note = Synthetic sequence or unknown origin
  source 1..11: mol_type = other RNA
gtcgtaatgac

SEQ ID NO: 2101 - RNA, 11 nt, synthetic construct
  misc_feature 1..11: note = Synthetic sequence or unknown origin
  source 1..11: mol_type = other RNA
gtcgtaatgac

SEQ ID NO: 2102 - RNA, 19 nt, synthetic construct
  misc_feature 1..19: note = Synthetic sequence or unknown origin
  source 1..19: mol_type = other RNA
gccccatggtggggcattt

SEQ ID NO: 2103 - RNA, 15 nt, synthetic construct
  misc_feature 1..15: note = Synthetic sequence or unknown origin
  source 1..15: mol_type = other RNA
gccccatggtggggc

SEQ ID NO: 2104 - RNA, 30 nt, synthetic construct
  misc_feature 1..30: note = Synthetic sequence or unknown origin
  source 1..30: mol_type = other RNA
aaaaagattacgcctagcgtagtctttttt

SEQ ID NO: 2105 - RNA, 29 nt, synthetic construct
  misc_feature 1..29: note = Synthetic sequence or unknown origin
  source 1..29: mol_type = other RNA
aaaaagattacgcctagcgtagtcttttt

SEQ ID NO: 2106 - RNA, 24 nt, synthetic construct
  misc_feature 1..24: note = Synthetic sequence or unknown origin
  source 1..24: mol_type = other RNA
aaaaagattacgcctagcgtagtc

SEQ ID NO: 2107 - RNA, 91 nt, synthetic construct
  misc_feature 1..91: note = Synthetic sequence or unknown origin
  source 1..91: mol_type = other RNA
gtttgagagtcttgtaagaaattacaagacgagtgcaaataaggatttatccgaaaccgtcgtaatgacgccccatggtggggcatttttt

SEQ ID NO: 2108 - RNA, 22 nt, synthetic construct
  misc_feature 1..22: note = Synthetic sequence or unknown origin
  source 1..22: mol_type = other RNA
gccccatggtggggcatttttt

SEQ ID NO: 2109 - RNA, 16 nt, synthetic construct
  misc_feature 1..16: note = Synthetic sequence or unknown origin
  source 1..16: mol_type = other RNA
gccccatggtggggca

SEQ ID NO: 2110 - RNA, 114 nt, synthetic construct
  misc_feature 1..114: note = Synthetic sequence or unknown origin
  source 1..114: mol_type = other RNA
gtttgagagctttgttagaaataacaaagcgagtgcaaataaggttaatccgaaaccgccatttatggctctgcatggtgcagaatttttttagcccctgataggggctttttt

SEQ ID NO: 2111 - RNA, 17 nt, synthetic construct
  misc_feature 1..17: note = Synthetic sequence or unknown origin
  source 1..17: mol_type = other RNA
gtttgagagctttgtta

SEQ ID NO: 2112 - RNA, 15 nt, synthetic construct
  misc_feature 1..15: note = Synthetic sequence or unknown origin
  source 1..15: mol_type = other RNA
gtttgagagctttgt

SEQ ID NO: 2113 - RNA, 12 nt, synthetic construct
  misc_feature 1..12: note = Synthetic sequence or unknown origin
  source 1..12: mol_type = other RNA
gtttgagagctt

SEQ ID NO: 2114 - RNA, 10 nt, synthetic construct
  misc_feature 1..10: note = Synthetic sequence or unknown origin
  source 1..10: mol_type = other RNA
gtttgagagc

SEQ ID NO: 2115 - RNA, 19 nt, synthetic construct
  misc_feature 1..19: note = Synthetic sequence or unknown origin
  source 1..19: mol_type = other RNA
taacaaagcgagtgcaaat

SEQ ID NO: 2116 - RNA, 17 nt, synthetic construct
  misc_feature 1..17: note = Synthetic sequence or unknown origin
  source 1..17: mol_type = other RNA
acaaagcgagtgcaaat

SEQ ID NO: 2117 - RNA, 14 nt, synthetic construct
  misc_feature 1..14: note = Synthetic sequence or unknown origin
  source 1..14: mol_type = other RNA
aagcgagtgcaaat

SEQ ID NO: 2118 - RNA, 12 nt, synthetic construct
  misc_feature 1..12: note = Synthetic sequence or unknown origin
  source 1..12: mol_type = other RNA
gcgagtgcaaat

SEQ ID NO: 2119 - RNA, 17 nt, synthetic construct
  misc_feature 1..17: note = Synthetic sequence or unknown origin
  source 1..17: mol_type = other RNA
aaggttaatccgaaacc

SEQ ID NO: 2120 - RNA, 17 nt, synthetic construct
  misc_feature 1..17: note = Synthetic sequence or unknown origin
  source 1..17: mol_type = other RNA
aaggttaatccgaaacc

SEQ ID NO: 2121 - RNA, 12 nt, synthetic construct
  misc_feature 1..12: note = Synthetic sequence or unknown origin
  source 1..12: mol_type = other RNA
gccatttatggc

SEQ ID NO: 2122 - RNA, 12 nt, synthetic construct
  misc_feature 1..12: note = Synthetic sequence or unknown origin
  source 1..12: mol_type = other RNA
gccatttatggc

SEQ ID NO: 2123 - RNA, 23 nt, synthetic construct
  misc_feature 1..23: note = Synthetic sequence or unknown origin
  source 1..23: mol_type = other RNA
tctgcatggtgcagaattttttt

SEQ ID NO: 2124 - RNA, 15 nt, synthetic construct
  misc_feature 1..15: note = Synthetic sequence or unknown origin
  source 1..15: mol_type = other RNA
tctgcatggtgcaga

SEQ ID NO: 2125 - RNA, 22 nt, synthetic construct
  misc_feature 1..22: note = Synthetic sequence or unknown origin
  source 1..22: mol_type = other RNA
agcccctgataggggctttttt

SEQ ID NO: 2126 - RNA, 17 nt, synthetic construct
  misc_feature 1..17: note = Synthetic sequence or unknown origin
  source 1..17: mol_type = other RNA
agcccctgataggggct

SEQ ID NO: 2127 - RNA, 16 nt, synthetic construct
  misc_feature 1..16: note = Synthetic sequence or unknown origin
  source 1..16: mol_type = other RNA
agcccctgataggggc

SEQ ID NO: 2128 - RNA, 114 nt, synthetic construct
  misc_feature 1..114: note = Synthetic sequence or unknown origin
  source 1..114: mol_type = other RNA
gtttgagagctttgttagaaataacaaagcgagtgcaaataaggttaatccgaaaccgccatttatggctctgcatggtgcagaatttctttagcccctgataggggctttttt

SEQ ID NO: 2129 - RNA, 23 nt, synthetic construct
  misc_feature 1..23: note = Synthetic sequence or unknown origin
  source 1..23: mol_type = other RNA
tctgcatggtgcagaatttcttt

SEQ ID NO: 2130 - RNA, 92 nt, synthetic construct
  misc_feature 1..92: note = Synthetic sequence or unknown origin
  source 1..92: mol_type = other RNA
gtttgagagctttgttagaaataacaaagcgagtgcaaataaggttaatccgaaaccgccatttatggctctgcatggtgcagaattttttt

SEQ ID NO: 2131 - RNA, 16 nt, synthetic construct
  misc_feature 1..16: note = Synthetic sequence or unknown origin
  source 1..16: mol_type = other RNA
tctgcatggtgcagaa

SEQ ID NO: 2132 - RNA, 116 nt, synthetic construct
  misc_feature 1..116: note = Synthetic sequence or unknown origin
  source 1..116: mol_type = other RNA
gtttgagagtagtgtaagaaattacactacgagttcaaataaagatttttccaaatcgtcgggtttctccgacagcacagtgtgtgcttcaaaagacctcttatgaggtctttttt

SEQ ID NO: 2133 - RNA, 17 nt, synthetic construct
  misc_feature 1..17: note = Synthetic sequence or unknown origin
  source 1..17: mol_type = other RNA
gtttgagagtagtgtaa

SEQ ID NO: 2134 - RNA, 15 nt, synthetic construct
  misc_feature 1..15: note = Synthetic sequence or unknown origin
  source 1..15: mol_type = other RNA
gtttgagagtagtgt

SEQ ID NO: 2135 - RNA, 12 nt, synthetic construct
  misc_feature 1..12: note = Synthetic sequence or unknown origin
  source 1..12: mol_type = other RNA
gtttgagagtag

SEQ ID NO: 2136 - RNA, 10 nt, synthetic construct
  misc_feature 1..10: note = Synthetic sequence or unknown origin
  source 1..10: mol_type = other RNA
gtttgagagt

SEQ ID NO: 2137 - RNA, 19 nt, synthetic construct
  misc_feature 1..19: note = Synthetic sequence or unknown origin
  source 1..19: mol_type = other RNA
ttacactacgagttcaaat

SEQ ID NO: 2138 - RNA, 17 nt, synthetic construct
  misc_feature 1..17: note = Synthetic sequence or unknown origin
  source 1..17: mol_type = other RNA
acactacgagttcaaat

SEQ ID NO: 2139 - RNA, 14 nt, synthetic construct
  misc_feature 1..14: note = Synthetic sequence or unknown origin
  source 1..14: mol_type = other RNA
ctacgagttcaaat

SEQ ID NO: 2140 - RNA, 12 nt, synthetic construct
  misc_feature 1..12: note = Synthetic sequence or unknown origin
  source 1..12: mol_type = other RNA
acgagttcaaat

SEQ ID NO: 2141 - RNA, 17 nt, synthetic construct
  misc_feature 1..17: note = Synthetic sequence or unknown origin
  source 1..17: mol_type = other RNA
aaagatttttccaaatc

SEQ ID NO: 2142 - RNA, 17 nt, synthetic construct
  misc_feature 1..17: note = Synthetic sequence or unknown origin
  source 1..17: mol_type = other RNA
aaagatttttccaaatc

SEQ ID NO: 2143 - RNA, 16 nt, synthetic construct
  misc_feature 1..16: note = Synthetic sequence or unknown origin
  source 1..16: mol_type = other RNA
gtcgggtttctccgac

SEQ ID NO: 2144 - RNA, 16 nt, synthetic construct
  misc_feature 1..16: note = Synthetic sequence or unknown origin
  source 1..16: mol_type = other RNA
gtcgggtttctccgac

SEQ ID NO: 2145 - RNA, 17 nt, synthetic construct
  misc_feature 1..17: note = Synthetic sequence or unknown origin
  source 1..17: mol_type = other RNA
agcacagtgtgtgcttc

SEQ ID NO: 2146 - RNA, 15 nt, synthetic construct
  misc_feature 1..15: note = Synthetic sequence or unknown origin
  source 1..15: mol_type = other RNA
agcacagtgtgtgct

SEQ ID NO: 2147 - RNA, 26 nt, synthetic construct
  misc_feature 1..26: note = Synthetic sequence or unknown origin
  source 1..26: mol_type = other RNA
aaaagacctcttatgaggtctttttt

SEQ ID NO: 2148 - RNA, 24 nt, synthetic construct
  misc_feature 1..24: note = Synthetic sequence or unknown origin
  source 1..24: mol_type = other RNA
aaaagacctcttatgaggtctttt

SEQ ID NO: 2149 - RNA, 20 nt, synthetic construct
  misc_feature 1..20: note = Synthetic sequence or unknown origin
  source 1..20: mol_type = other RNA
aaaagacctcttatgaggtc

SEQ ID NO: 2150 - RNA, 116 nt, synthetic construct
  misc_feature 1..116: note = Synthetic sequence or unknown origin
  source 1..116: mol_type = other RNA
gtttgagagtagtgtaagaaattacactacgagttcaaataaagatttctccaaatcgtcgggtttctccgacagcacagtgtgtgcttcaaaagacctcttatgaggtctttttt

SEQ ID NO: 2151 - RNA, 17 nt, synthetic construct
  misc_feature 1..17: note = Synthetic sequence or unknown origin
  source 1..17: mol_type = other RNA
aaagatttctccaaatc

SEQ ID NO: 2152 - RNA, 17 nt, synthetic construct
  misc_feature 1..17: note = Synthetic sequence or unknown origin
  source 1..17: mol_type = other RNA
aaagatttctccaaatc

SEQ ID NO: 2153 - RNA, 96 nt, synthetic construct
  misc_feature 1..96: note = Synthetic sequence or unknown origin
  source 1..96: mol_type = other RNA
gtttgagagtagtgtaagaaattacactacgagttcaaataaagatttttccaaatcgtcgggtttctccgacagcacagtgtgtgcttctttttt

SEQ ID NO: 2154 - RNA, 23 nt, synthetic construct
  misc_feature 1..23: note = Synthetic sequence or unknown origin
  source 1..23: mol_type = other RNA
agcacagtgtgtgcttctttttt

SEQ ID NO: 2155 - RNA, 17 nt, synthetic construct
  misc_feature 1..17: note = Synthetic sequence or unknown origin
  source 1..17: mol_type = other RNA
agcacagtgtgtgcttc

SEQ ID NO: 2156 - RNA, 96 nt, synthetic construct
  misc_feature 1..96: note = Synthetic sequence or unknown origin
  source 1..96: mol_type = other RNA
gtttgagagtagtgtaagaaattacactacgagttcaaataaagatttctccaaatcgtcgggtttctccgacagcacagtgtgtgcttctttttt

SEQ ID NO: 2157 - RNA, 114 nt, synthetic construct
  misc_feature 1..114: note = Synthetic sequence or unknown origin
  source 1..114: mol_type = other RNA
gtttgagagtagtgtaagaaattacactacgagttcaaataaagattcttcgaaatcgcggcttgtccgtcagcacaggtgtgcttccaaaagacctcttcggaggtctttttt

SEQ ID NO: 2158 - RNA, 17 nt, synthetic construct
  misc_feature 1..17: note = Synthetic sequence or unknown origin
  source 1..17: mol_type = other RNA
gtttgagagtagtgtaa

SEQ ID NO: 2159 - RNA, 15 nt, synthetic construct
  misc_feature 1..15: note = Synthetic sequence or unknown origin
  source 1..15: mol_type = other RNA
gtttgagagtagtgt

SEQ ID NO: 2160 - RNA, 12 nt, synthetic construct
  misc_feature 1..12: note = Synthetic sequence or unknown origin
  source 1..12: mol_type = other RNA
gtttgagagtag

SEQ ID NO: 2161 - RNA, 10 nt, synthetic construct
  misc_feature 1..10: note = Synthetic sequence or unknown origin
  source 1..10: mol_type = other RNA
gtttgagagt

SEQ ID NO: 2162 - RNA, 19 nt, synthetic construct
  misc_feature 1..19: note = Synthetic sequence or unknown origin
  source 1..19: mol_type = other RNA
ttacactacgagttcaaat

SEQ ID NO: 2163 - RNA, 17 nt, synthetic construct
  misc_feature 1..17: note = Synthetic sequence or unknown origin
  source 1..17: mol_type = other RNA
acactacgagttcaaat

SEQ ID NO: 2164 - RNA, 14 nt, synthetic construct
  misc_feature 1..14: note = Synthetic sequence or unknown origin
  source 1..14: mol_type = other RNA
ctacgagttcaaat

SEQ ID NO: 2165 - RNA, 12 nt, synthetic construct
  misc_feature 1..12: note = Synthetic sequence or unknown origin
  source 1..12: mol_type = other RNA
acgagttcaaat

SEQ ID NO: 2166 - RNA, 17 nt, synthetic construct
  misc_feature 1..17: note = Synthetic sequence or unknown origin
  source 1..17: mol_type = other RNA
aaagattcttcgaaatc

SEQ ID NO: 2167 - RNA, 17 nt, synthetic construct
  misc_feature 1..17: note = Synthetic sequence or unknown origin
  source 1..17: mol_type = other RNA
aaagattcttcgaaatc

SEQ ID NO: 2168 - RNA, 14 nt, synthetic construct
  misc_feature 1..14: note = Synthetic sequence or unknown origin
  source 1..14: mol_type = other RNA
gcggcttgtccgtc

SEQ ID NO: 2169 - RNA, 13 nt, synthetic construct
  misc_feature 1..13: note = Synthetic sequence or unknown origin
  source 1..13: mol_type = other RNA
gcggcttgtccgt

SEQ ID NO: 2170 - RNA, 17 nt, synthetic construct
  misc_feature 1..17: note = Synthetic sequence or unknown origin
  source 1..17: mol_type = other RNA
agcacaggtgtgcttcc

SEQ ID NO: 2171 - RNA, 14 nt, synthetic construct
  misc_feature 1..14: note = Synthetic sequence or unknown origin
  source 1..14: mol_type = other RNA
agcacaggtgtgct

SEQ ID NO: 2172 - RNA, 26 nt, synthetic construct
  misc_feature 1..26: note = Synthetic sequence or unknown origin
  source 1..26: mol_type = other RNA
aaaagacctcttcggaggtctttttt

SEQ ID NO: 2173 - RNA, 24 nt, synthetic construct
  misc_feature 1..24: note = Synthetic sequence or unknown origin
  source 1..24: mol_type = other RNA
aaaagacctcttcggaggtctttt

SEQ ID NO: 2174 - RNA, 20 nt, synthetic construct
  misc_feature 1..20: note = Synthetic sequence or unknown origin
  source 1..20: mol_type = other RNA
aaaagacctcttcggaggtc

SEQ ID NO: 2175 - RNA, 77 nt, synthetic construct
  misc_feature 1..77: note = Synthetic sequence or unknown origin
  source 1..77: mol_type = other RNA
gtttgagagtagtgtaagaaattacactacgagttcaaataaagattcttcgaaatcgcggcttgtccgtctttttt

SEQ ID NO: 2176 - RNA, 37 nt, synthetic construct
  misc_feature 1..37: note = Synthetic sequence or unknown origin
  source 1..37: mol_type = other RNA
aaagattcttcgaaatcgcggcttgtccgtctttttt

SEQ ID NO: 2177 - RNA, 25 nt, synthetic construct
  misc_feature 1..25: note = Synthetic sequence or unknown origin
  source 1..25: mol_type = other RNA
gaaatcgcggcttgtccgtcttttt

SEQ ID NO: 2178 - RNA, 31 nt, synthetic construct
  misc_feature 1..31: note = Synthetic sequence or unknown origin
  source 1..31: mol_type = other RNA
aaagattcttcgaaatcgcggcttgtccgtc

SEQ ID NO: 2179 - RNA, 123 nt, synthetic construct
  misc_feature 1..123: note = Synthetic sequence or unknown origin
  source 1..123: mol_type = other RNA
gtttgagagtggtgtaagaaattacaccgcatgttcaaacaaaaacatgttcaaaccgtccaataggacttccattgtggaaacaaagaagcttgcccgtttgggtaggcttttttgtttttt

SEQ ID NO: 2180 - RNA, 17 nt, synthetic construct
  misc_feature 1..17: note = Synthetic sequence or unknown origin
  source 1..17: mol_type = other RNA
gtttgagagtggtgtaa

SEQ ID NO: 2181 - RNA, 15 nt, synthetic construct
  misc_feature 1..15: note = Synthetic sequence or unknown origin
  source 1..15: mol_type = other RNA
gtttgagagtggtgt

SEQ ID NO: 2182 - RNA, 12 nt, synthetic construct
  misc_feature 1..12: note = Synthetic sequence or unknown origin
  source 1..12: mol_type = other RNA
gtttgagagtgg

SEQ ID NO: 2183 - RNA, 10 nt, synthetic construct
  misc_feature 1..10: note = Synthetic sequence or unknown origin
  source 1..10: mol_type = other RNA
gtttgagagt

SEQ ID NO: 2184 - RNA, 19 nt, synthetic construct
  misc_feature 1..19: note = Synthetic sequence or unknown origin
  source 1..19: mol_type = other RNA
ttacaccgcatgttcaaac

SEQ ID NO: 2185 - RNA, 17 nt, synthetic construct
  misc_feature 1..17: note = Synthetic sequence or unknown origin
  source 1..17: mol_type = other RNA
acaccgcatgttcaaac

SEQ ID NO: 2186 - RNA, 14 nt, synthetic construct
  misc_feature 1..14: note = Synthetic sequence or unknown origin
  source 1..14: mol_type = other RNA
ccgcatgttcaaac

SEQ ID NO: 2187 - RNA, 12 nt, synthetic construct
  misc_feature 1..12: note = Synthetic sequence or unknown origin
  source 1..12: mol_type = other RNA
gcatgttcaaac

SEQ ID NO: 2188 - RNA, 38 nt, synthetic construct
  misc_feature 1..38: note = Synthetic sequence or unknown origin
  source 1..38: mol_type = other RNA
aaaaacatgttcaaaccgtccaataggacttccattgt

SEQ ID NO: 2189 - RNA, 29 nt, synthetic construct
  misc_feature 1..29: note = Synthetic sequence or unknown origin
  source 1..29: mol_type = other RNA
aaaaacatgttcaaaccgtccaataggac

SEQ ID NO: 2190 - RNA, 45 nt, synthetic construct
  misc_feature 1..45: note = Synthetic sequence or unknown origin
  source 1..45: mol_type = other RNA
ggaaacaaagaagcttgcccgtttgggtaggcttttttgtttttt

SEQ ID NO: 2191 - RNA, 44 nt, synthetic construct
  misc_feature 1..44: note = Synthetic sequence or unknown origin
  source 1..44: mol_type = other RNA
ggaaacaaagaagcttgcccgtttgggtaggcttttttgttttt

SEQ ID NO: 2192 - RNA, 39 nt, synthetic construct
  misc_feature 1..39: note = Synthetic sequence or unknown origin
  source 1..39: mol_type = other RNA
ggaaacaaagaagcttgcccgtttgggtaggcttttttg

SEQ ID NO: 2193 - RNA, 123 nt, synthetic construct
  misc_feature 1..123: note = Synthetic sequence or unknown origin
  source 1..123: mol_type = other RNA
gtttgagagtggtgtaagaaattacaccgcatgttcaaacaaaaacatgttcaaaccgtccaataggacttccattgtggaaacaaagaagcttgcccgtttgggtaggcttctttgtttttt

SEQ ID NO: 2194 - RNA, 45 nt, synthetic construct
  misc_feature 1..45: note = Synthetic sequence or unknown origin
  source 1..45: mol_type = other RNA
ggaaacaaagaagcttgcccgtttgggtaggcttctttgtttttt

SEQ ID NO: 2195 - RNA, 44 nt, synthetic construct
  misc_feature 1..44: note = Synthetic sequence or unknown origin
  source 1..44: mol_type = other RNA
ggaaacaaagaagcttgcccgtttgggtaggcttctttgttttt

SEQ ID NO: 2196 - RNA, 39 nt, synthetic construct
  misc_feature 1..39: note = Synthetic sequence or unknown origin
  source 1..39: mol_type = other RNA
ggaaacaaagaagcttgcccgtttgggtaggcttctttg

SEQ ID NO: 2197 - RNA, 116 nt, synthetic construct
  misc_feature 1..116: note = Synthetic sequence or unknown origin
  source 1..116: mol_type = other RNA
gtttgagagtggtgtaagaaattacaccgcatgttcaaacaaaaacatgttcaaaccgtccaataggacttccattgtggaaacaaagaagcttgcccgtttgggtaggctttttt

SEQ ID NO: 2198 - RNA, 29 nt, synthetic construct
  misc_feature 1..29: note = Synthetic sequence or unknown origin
  source 1..29: mol_type = other RNA
aaaaacatgttcaaaccgtccaataggac

SEQ ID NO: 2199 - RNA, 15 nt, synthetic construct
  misc_feature 1..15: note = Synthetic sequence or unknown origin
  source 1..15: mol_type = other RNA
ttccattgtggaaac

SEQ ID NO: 2200 - RNA, 13 nt, synthetic construct
  misc_feature 1..13: note = Synthetic sequence or unknown origin
  source 1..13: mol_type = other RNA
ttccattgtggaa

SEQ ID NO: 2201 - RNA, 32 nt, synthetic construct
  misc_feature 1..32: note = Synthetic sequence or unknown origin
  source 1..32: mol_type = other RNA
aaagaagcttgcccgtttgggtaggctttttt

SEQ ID NO: 2202 - RNA, 32 nt, synthetic construct; identical to SEQ ID NO: 2201
  misc_feature 1..32: note = Synthetic sequence or unknown origin
  source 1..32: mol_type = other RNA

SEQ ID NO: 2203 - RNA, 26 nt, synthetic construct
  misc_feature 1..26: note = Synthetic sequence or unknown origin
  source 1..26: mol_type = other RNA
aaagaagcttgcccgtttgggtaggc

SEQ ID NO: 2204 - RNA, 118 nt, synthetic construct
  misc_feature 1..118: note = Synthetic sequence or unknown origin
  source 1..118: mol_type = other RNA
gtttgagagtaatgtaagaaattacatcacgagttcaaaaatcatgatttattcaaatcgtcttcttcggaagaccccacagcgtgtggactaaaaaactagcttcggctagtttttt

SEQ ID NO: 2205 - RNA, 17 nt, synthetic construct
  misc_feature 1..17: note = Synthetic sequence or unknown origin
  source 1..17: mol_type = other RNA
gtttgagagtaatgtaa

SEQ ID NO: 2206 - RNA, 15 nt, synthetic construct
  misc_feature 1..15: note = Synthetic sequence or unknown origin
  source 1..15: mol_type = other RNA
gtttgagagtaatgt

SEQ ID NO: 2207 - RNA, 12 nt, synthetic construct
  misc_feature 1..12: note = Synthetic sequence or unknown origin
  source 1..12: mol_type = other RNA
gtttgagagtaa

SEQ ID NO: 2208 - RNA, 10 nt, synthetic construct
  misc_feature 1..10: note = Synthetic sequence or unknown origin
  source 1..10: mol_type = other RNA
gtttgagagt

SEQ ID NO: 2209 - RNA, 18 nt, synthetic construct
  misc_feature 1..18: note = Synthetic sequence or unknown origin
  source 1..18: mol_type = other RNA
ttacatcacgagttcaaa

SEQ ID NO: 2210 - RNA, 16 nt, synthetic construct
  misc_feature 1..16: note = Synthetic sequence or unknown origin
  source 1..16: mol_type = other RNA
acatcacgagttcaaa

SEQ ID NO: 2211 - RNA, 13 nt, synthetic construct
  misc_feature 1..13: note = Synthetic sequence or unknown origin
  source 1..13: mol_type = other RNA
tcacgagttcaaa

SEQ ID NO: 2212 - RNA, 18 nt, synthetic construct
  misc_feature 1..18: note = Synthetic sequence or unknown origin
  source 1..18: mol_type = other RNA
ttacatcacgagttcaaa

SEQ ID NO: 2213 - RNA, 20 nt, synthetic construct
  misc_feature 1..20: note = Synthetic sequence or unknown origin
  source 1..20: mol_type = other RNA
aatcatgatttattcaaatc

SEQ ID NO: 2214 - RNA, 20 nt, synthetic construct
  misc_feature 1..20: note = Synthetic sequence or unknown origin
  source 1..20: mol_type = other RNA
aatcatgatttattcaaatc

SEQ ID NO: 2215 - RNA, 17 nt, synthetic construct
  misc_feature 1..17: note = Synthetic sequence or unknown origin
  source 1..17: mol_type = other RNA
gtcttcttcggaagacc

SEQ ID NO: 2216 - RNA, 16 nt, synthetic construct
  misc_feature 1..16: note = Synthetic sequence or unknown origin
  source 1..16: mol_type = other RNA
gtcttcttcggaagac

SEQ ID NO: 2217 - RNA, 16 nt, synthetic construct
  misc_feature 1..16: note = Synthetic sequence or unknown origin
  source 1..16: mol_type = other RNA
ccacagcgtgtggact

SEQ ID NO: 2218 - RNA, 13 nt, synthetic construct
  misc_feature 1..13: note = Synthetic sequence or unknown origin
  source 1..13: mol_type = other RNA
ccacagcgtgtgg

SEQ ID NO: 2219 - RNA, 26 nt, synthetic construct
  misc_feature 1..26: note = Synthetic sequence or unknown origin
  source 1..26: mol_type = other RNA
aaaaaactagcttcggctagtttttt

SEQ ID NO: 2220 - RNA, 26 nt, synthetic construct
  misc_feature 1..26: note = Synthetic sequence or unknown origin
  source 1..26: mol_type = other RNA
aaaaaactagcttcggctagtttttt

SEQ ID NO: 2221 - RNA, 20 nt, synthetic construct
  misc_feature 1..20: note = Synthetic sequence or unknown origin
  source 1..20: mol_type = other RNA
aaaaaactagcttcggctag

SEQ ID NO: 2222 - RNA, 125 nt, synthetic construct
  misc_feature 1..125: note = Synthetic sequence or unknown origin
  source 1..125: mol_type = other RNA
gtttgagagtaatgtaagaaattacatcacgagttcaaaaatcatgatttattcaaatcgtcttcttcggaagaccccacagcgtgtggactaaaaaactagcttcggctagttttttatttttt

SEQ ID NO: 2223 - RNA, 15 nt, synthetic construct
  misc_feature 1..15: note = Synthetic sequence or unknown origin
  source 1..15: mol_type = other RNA
ccacagcgtgtggac

SEQ ID NO: 2224 - RNA, 34 nt, synthetic construct
  misc_feature 1..34: note = Synthetic sequence or unknown origin
  source 1..34: mol_type = other RNA
taaaaaactagcttcggctagttttttatttttt

SEQ ID NO: 2225 - RNA, 28 nt, synthetic construct
  misc_feature 1..28: note = Synthetic sequence or unknown origin
  source 1..28: mol_type = other RNA
taaaaaactagcttcggctagtttttta

SEQ ID NO: 2226 - RNA, 28 nt, synthetic construct
  misc_feature 1..28: note = Synthetic sequence or unknown origin
  source 1..28: mol_type = other RNA
taaaaaactagcttcggctagtttttta

SEQ ID NO: 2227 - RNA, 125 nt, synthetic construct
  misc_feature 1..125: note = Synthetic sequence or unknown origin
  source 1..125: mol_type = other RNA
gtttgagagtaatgtaagaaattacatcacgagttcaaaaatcatgatttattcaaatcgtcttcttcggaagaccccacagcgtgtggactaaagaactagcttcggctagttctttatttttt

SEQ ID NO: 2228 - RNA, 34 nt, synthetic construct
  misc_feature 1..34: note = Synthetic sequence or unknown origin
  source 1..34: mol_type = other RNA
taaagaactagcttcggctagttctttatttttt

SEQ ID NO: 2229 - RNA, 28 nt, synthetic construct
  misc_feature 1..28: note = Synthetic sequence or unknown origin
  source 1..28: mol_type = other RNA
taaagaactagcttcggctagttcttta

SEQ ID NO: 2230 - RNA, 28 nt, synthetic construct
  misc_feature 1..28: note = Synthetic sequence or unknown origin
  source 1..28: mol_type = other RNA
taaagaactagcttcggctagttcttta

SEQ ID NO: 2231 - RNA, 113 nt, synthetic construct
  misc_feature 1..113: note = Synthetic sequence or unknown origin
  source 1..113: mol_type = other RNA
gtttgagagccttgttagaaataacaaggcgggtgcaaataaggtttttaccggaatcgtcgttatgactctgcatggtgcagattttaagacttagaaataagtcttttttt

SEQ ID NO: 2232 - RNA, 17 nt, synthetic construct
  misc_feature 1..17: note = Synthetic sequence or unknown origin
  source 1..17: mol_type = other RNA
gtttgagagccttgtta

SEQ ID NO: 2233 - RNA, 15 nt, synthetic construct
  misc_feature 1..15: note = Synthetic sequence or unknown origin
  source 1..15: mol_type = other RNA
gtttgagagccttgt

SEQ ID NO: 2234 - RNA, 12 nt, synthetic construct
  misc_feature 1..12: note = Synthetic sequence or unknown origin
  source 1..12: mol_type = other RNA
gtttgagagcct

SEQ ID NO: 2235 - RNA, 10 nt, synthetic construct
  misc_feature 1..10: note = Synthetic sequence or unknown origin
  source 1..10: mol_type = other RNA
gtttgagagc

SEQ ID NO: 2236 - RNA, 19 nt, synthetic construct
  misc_feature 1..19: note = Synthetic sequence or unknown origin
  source 1..19: mol_type = other RNA
taacaaggcgggtgcaaat

SEQ ID NO: 2237 - RNA, 17 nt, synthetic construct
  misc_feature 1..17: note = Synthetic sequence or unknown origin
  source 1..17: mol_type = other RNA
acaaggcgggtgcaaat

SEQ ID NO: 2238 - RNA, 14 nt, synthetic construct
  misc_feature 1..14: note = Synthetic sequence or unknown origin
  source 1..14: mol_type = other RNA
aggcgggtgcaaat

SEQ ID NO: 2239 - RNA, 12 nt, synthetic construct
  misc_feature 1..12: note = Synthetic sequence or unknown origin
  source 1..12: mol_type = other RNA
gcgggtgcaaat

SEQ ID NO: 2240 - RNA, 18 nt, synthetic construct
  misc_feature 1..18: note = Synthetic sequence or unknown origin
  source 1..18: mol_type = other RNA
aaggtttttaccggaatc

SEQ ID NO: 2241 - RNA, 12 nt, synthetic construct
  misc_feature 1..12: note = Synthetic sequence or unknown origin
  source 1..12: mol_type = other RNA
aaggtttttacc

SEQ ID NO: 2242 - RNA, 11 nt, synthetic construct
  misc_feature 1..11: note = Synthetic sequence or unknown origin
  source 1..11: mol_type = other RNA
gtcgttatgac

SEQ ID NO: 2243 - RNA, 11 nt, synthetic construct
  misc_feature 1..11: note = Synthetic sequence or unknown origin
  source 1..11: mol_type = other RNA
gtcgttatgac

SEQ ID NO: 2244 - RNA, 19 nt, synthetic construct
  misc_feature 1..19: note = Synthetic sequence or unknown origin
  source 1..19: mol_type = other RNA
tctgcatggtgcagatttt

SEQ ID NO: 2245 - RNA, 15 nt, synthetic construct
  misc_feature 1..15: note = Synthetic sequence or unknown origin
  source 1..15: mol_type = other RNA
tctgcatggtgcaga

SEQ ID NO: 2246 - RNA, 25 nt, synthetic construct
  misc_feature 1..25: note = Synthetic sequence or unknown origin
  source 1..25: mol_type = other RNA
aagacttagaaataagtcttttttt

SEQ ID NO: 2247 - RNA, 20 nt, synthetic construct
  misc_feature 1..20: note = Synthetic sequence or unknown origin
  source 1..20: mol_type = other RNA
aagacttagaaataagtctt

SEQ ID NO: 2248 - RNA, 18 nt, synthetic construct
  misc_feature 1..18: note = Synthetic sequence or unknown origin
  source 1..18: mol_type = other RNA
aagacttagaaataagtc

SEQ ID NO: 2249 - RNA, 113 nt, synthetic construct
  misc_feature 1..113: note = Synthetic sequence or unknown origin
  source 1..113: mol_type = other RNA
gtttgagagccttgttagaaataacaaggcgggtgcaaataaggtttctaccggaatcgtcgttatgactctgcatggtgcagattctaagacttagaaataagtcttttttt

SEQ ID NO: 2250 - RNA, 18 nt, synthetic construct
  misc_feature 1..18: note = Synthetic sequence or unknown origin
  source 1..18: mol_type = other RNA
aaggtttctaccggaatc

SEQ ID NO: 2251 - RNA, 18 nt, synthetic construct
  misc_feature 1..18: note = Synthetic sequence or unknown origin
  source 1..18: mol_type = other RNA
aaggtttctaccggaatc

SEQ ID NO: 2252 - RNA, 19 nt, synthetic construct
  misc_feature 1..19: note = Synthetic sequence or unknown origin
  source 1..19: mol_type = other RNA
tctgcatggtgcagattct

SEQ ID NO: 2253 - RNA, 90 nt, synthetic construct
  misc_feature 1..90: note = Synthetic sequence or unknown origin
  source 1..90: mol_type = other RNA
gtttgagagccttgttagaaataacaaggcgggtgcaaataaggtttttaccggaatcgtcgttatgactctgcatggtgcagatttttt

SEQ ID NO: 2254 - RNA, 21 nt, synthetic construct
  misc_feature 1..21: note = Synthetic sequence or unknown origin
  source 1..21: mol_type = other RNA
tctgcatggtgcagatttttt

SEQ ID NO: 2255 - RNA, 15 nt, synthetic construct
  misc_feature 1..15: note = Synthetic sequence or unknown origin
  source 1..15: mol_type = other RNA
tctgcatggtgcaga

SEQ ID NO: 2256 - RNA, 90 nt, synthetic construct
  misc_feature 1..90: note = Synthetic sequence or unknown origin
  source 1..90: mol_type = other RNA
gtttgagagccttgttagaaataacaaggcgggtgcaaataaggtttctaccggaatcgtcgttatgactctgcatggtgcagatttttt

SEQ ID NO: 2257 - RNA, 115 nt, synthetic construct
  misc_feature 1..115: note = Synthetic sequence or unknown origin
  source 1..115: mol_type = other RNA
gtttgagagccttgttagaaataacaaggcgagtgcaaataaggttaatccgtaatcgtctcttcggagactccacagggtgtggataaaagtcatgagtattcatggctttttt

SEQ ID NO: 2258 - RNA, 17 nt, synthetic construct
  misc_feature 1..17: note = Synthetic sequence or unknown origin
  source 1..17: mol_type = other RNA
gtttgagagccttgtta

SEQ ID NO: 2259 - RNA, 15 nt, synthetic construct
  misc_feature 1..15: note = Synthetic sequence or unknown origin
  source 1..15: mol_type = other RNA
gtttgagagccttgt

SEQ ID NO: 2260 - RNA, 12 nt, synthetic construct
  misc_feature 1..12: note = Synthetic sequence or unknown origin
  source 1..12: mol_type = other RNA
gtttgagagcct

SEQ ID NO: 2261 - RNA, 10 nt, synthetic construct
  misc_feature 1..10: note = Synthetic sequence or unknown origin
  source 1..10: mol_type = other RNA
gtttgagagc

SEQ ID NO: 2262 - RNA, 19 nt, synthetic construct
  misc_feature 1..19: note = Synthetic sequence or unknown origin
  source 1..19: mol_type = other RNA
taacaaggcgagtgcaaat

SEQ ID NO: 2263 - RNA, 17 nt, synthetic construct
  misc_feature 1..17: note = Synthetic sequence or unknown origin
  source 1..17: mol_type = other RNA
acaaggcgagtgcaaat

SEQ ID NO: 2264 - RNA, 14 nt, synthetic construct
  misc_feature 1..14: note = Synthetic sequence or unknown origin
  source 1..14: mol_type = other RNA
aggcgagtgcaaat

SEQ ID NO: 2265 - RNA, 12 nt, synthetic construct
  misc_feature 1..12: note = Synthetic sequence or unknown origin
  source 1..12: mol_type = other RNA
gcgagtgcaaat

SEQ ID NO: 2266 - RNA, 17 nt, synthetic construct
  misc_feature 1..17: note = Synthetic sequence or unknown origin
  source 1..17: mol_type = other RNA
aaggttaatccgtaatc

SEQ ID NO: 2267 - RNA, 17 nt, synthetic construct
  misc_feature 1..17: note = Synthetic sequence or unknown origin
  source 1..17: mol_type = other RNA
aaggttaatccgtaatc

SEQ ID NO: 2268 - RNA, 14 nt, synthetic construct
  misc_feature 1..14: note = Synthetic sequence or unknown origin
  source 1..14: mol_type = other RNA
gtctcttcggagac

SEQ ID NO: 2269 - RNA, 14 nt, synthetic construct
  misc_feature 1..14: note = Synthetic sequence or unknown origin
  source 1..14: mol_type = other RNA
gtctcttcggagac

SEQ ID NO: 2270 - RNA, 16 nt, synthetic construct
  misc_feature 1..16: note = Synthetic sequence or unknown origin
  source 1..16: mol_type = other RNA
tccacagggtgtggat

SEQ ID NO: 2271 - RNA, 15 nt, synthetic construct
  misc_feature 1..15: note = Synthetic sequence or unknown origin
  source 1..15: mol_type = other RNA
tccacagggtgtgga

SEQ ID NO: 2272 - RNA, 28 nt, synthetic construct
  misc_feature 1..28: note = Synthetic sequence or unknown origin
  source 1..28: mol_type = other RNA
aaaagtcatgagtattcatggctttttt

SEQ ID NO: 2273 - RNA, 26 nt, synthetic construct
  misc_feature 1..26: note = Synthetic sequence or unknown origin
  source 1..26: mol_type = other RNA
aaaagtcatgagtattcatggctttt

SEQ ID NO: 2274 - RNA, 22 nt, synthetic construct
  misc_feature 1..22: note = Synthetic sequence or unknown origin
  source 1..22: mol_type = other RNA
aaaagtcatgagtattcatggc

SEQ ID NO: 2275 - RNA, 92 nt, synthetic construct
  misc_feature 1..92: note = Synthetic sequence or unknown origin
  source 1..92: mol_type = other RNA
gtttgagagccttgttagaaataacaaggcgagtgcaaataaggttaatccgtaatcgtctcttcggagactccacagggtgtggatttttt

SEQ ID NO: 2276 - RNA, 21 nt, synthetic construct
  misc_feature 1..21: note = Synthetic sequence or unknown origin
  source 1..21: mol_type = other RNA
tccacagggtgtggatttttt

SEQ ID NO: 2277 - RNA, 15 nt, synthetic construct
  misc_feature 1..15: note = Synthetic sequence or unknown origin
  source 1..15: mol_type = other RNA
tccacagggtgtgga

SEQ ID NO: 2278 - RNA, 126 nt, synthetic construct
  misc_feature 1..126: note = Synthetic sequence or unknown origin
  source 1..126: mol_type = other RNA
gtttgagagcagtgttggaaacaacactgcacgttcaaataagcagattgctacaaggttcccgtaagggaatgaccatctggtcacatgaatagcccccggcaacggtggctgtttttgtttttt

SEQ ID NO: 2279 - RNA, 17 nt, synthetic construct
  misc_feature 1..17: note = Synthetic sequence or unknown origin
  source 1..17: mol_type = other RNA
gtttgagagcagtgttg

SEQ ID NO: 2280 - RNA, 15 nt, synthetic construct
  misc_feature 1..15: note = Synthetic sequence or unknown origin
  source 1..15: mol_type = other RNA
gtttgagagcagtgt

SEQ ID NO: 2281 - RNA, 12 nt, synthetic construct
  misc_feature 1..12: note = Synthetic sequence or unknown origin
  source 1..12: mol_type = other RNA
gtttgagagcag

SEQ ID NO: 2282 - RNA, 10 nt, synthetic construct
  misc_feature 1..10: note = Synthetic sequence or unknown origin
  source 1..10: mol_type = other RNA
gtttgagagc

SEQ ID NO: 2283 - RNA, 19 nt, synthetic construct
  misc_feature 1..19: note = Synthetic sequence or unknown origin
  source 1..19: mol_type = other RNA
caacactgcacgttcaaat

SEQ ID NO: 2284 - RNA, 17 nt, synthetic construct
  misc_feature 1..17: note = Synthetic sequence or unknown origin
  source 1..17: mol_type = other RNA
acactgcacgttcaaat

SEQ ID NO: 2285 - RNA, 14 nt, synthetic construct
  misc_feature 1..14: note = Synthetic sequence or unknown origin
  source 1..14: mol_type = other RNA
ctgcacgttcaaat

SEQ ID NO: 2286 - RNA, 12 nt, synthetic construct
  misc_feature 1..12: note = Synthetic sequence or unknown origin
  source 1..12: mol_type = other RNA
gcacgttcaaat

SEQ ID NO: 2287 - RNA, 17 nt, synthetic construct
  misc_feature 1..17: note = Synthetic sequence or unknown origin
  source 1..17: mol_type = other RNA
aagcagattgctacaag

SEQ ID NO: 2288 - RNA, 12 nt, synthetic construct
  misc_feature 1..12: note = Synthetic sequence or unknown origin
  source 1..12: mol_type = other RNA
aagcagattgct

SEQ ID NO: 2289 - RNA, 16 nt, synthetic construct
  misc_feature 1..16: note = Synthetic sequence or unknown origin
  source 1..16: mol_type = other RNA
gttcccgtaagggaat

SEQ ID NO: 2290 - RNA, 16 nt, synthetic construct
  misc_feature 1..16: note = Synthetic sequence or unknown origin
  source 1..16: mol_type = other RNA
gttcccgtaagggaat

SEQ ID NO: 2291 - RNA, 12 nt, synthetic construct
  misc_feature 1..12: note = Synthetic sequence or unknown origin
  source 1..12: mol_type = other RNA
gaccatctggtc

SEQ ID NO: 2292 - RNA, 12 nt, synthetic construct
  misc_feature 1..12: note = Synthetic sequence or unknown origin
  source 1..12: mol_type = other RNA
gaccatctggtc

SEQ ID NO: 2293 - RNA, 41 nt, synthetic construct
  misc_feature 1..41: note = Synthetic sequence or unknown origin
  source 1..41: mol_type = other RNA
acatgaatagcccccggcaacggtggctgtttttgtttttt

SEQ ID NO: 2294 - RNA, 36 nt, synthetic construct
  misc_feature 1..36: note = Synthetic sequence or unknown origin
  source 1..36: mol_type = other RNA
acatgaatagcccccggcaacggtggctgtttttgt

SEQ ID NO: 2295 - RNA, 35 nt, synthetic construct
  misc_feature 1..35: note = Synthetic sequence or unknown origin
  source 1..35: mol_type = other RNA
acatgaatagcccccggcaacggtggctgtttttg

SEQ ID NO: 2296 - RNA, 126 nt, synthetic construct
  misc_feature 1..126: note = Synthetic sequence or unknown origin
  source 1..126: mol_type = other RNA
gtttgagagcagtgttggaaacaacactgcacgttcaaataagcagattgctacaaggttcccgtaagggaatgaccatctggtcacatgaatagcccccggcaacggtggctgtttctgtttttt

SEQ ID NO: 2297 - RNA, 41 nt, synthetic construct
  misc_feature 1..41: note = Synthetic sequence or unknown origin
  source 1..41: mol_type = other RNA
acatgaatagcccccggcaacggtggctgtttctgtttttt

SEQ ID NO: 2298 - RNA, 36 nt, synthetic construct
  misc_feature 1..36: note = Synthetic sequence or unknown origin
  source 1..36: mol_type = other RNA
acatgaatagcccccggcaacggtggctgtttctgt

SEQ ID NO: 2299 - RNA, 35 nt, synthetic construct
  misc_feature 1..35: note = Synthetic sequence or unknown origin
  source 1..35: mol_type = other RNA
acatgaatagcccccggcaacggtggctgtttctg

SEQ ID NO: 2300 - RNA, 120 nt, synthetic construct
  misc_feature 1..120: note = Synthetic sequence or unknown origin
  source 1..120: mol_type = other RNA
gtttgagagcagtgttggaaacaacactgcacgttcaaataagcagattgctacaaggttcccgtaagggaatgaccatctggtcacatgaatagcccccggcaacggtggctgtttttt

SEQ ID NO: 2301 - RNA, 16 nt, synthetic construct
  misc_feature 1..16: note = Synthetic sequence or unknown origin
  source 1..16: mol_type = other RNA
gaccatctggtcacat

SEQ ID NO: 2302 - RNA, 31 nt, synthetic construct
  misc_feature 1..31: note = Synthetic sequence or unknown origin
  source 1..31: mol_type = other RNA
gaatagcccccggcaacggtggctgtttttt

SEQ ID NO: 2303 - RNA, 28 nt, synthetic construct
  misc_feature 1..28: note = Synthetic sequence or unknown origin
  source 1..28: mol_type = other RNA
gaatagcccccggcaacggtggctgttt

SEQ ID NO: 2304 - RNA, 25 nt, synthetic construct
  misc_feature 1..25: note = Synthetic sequence or unknown origin
  source 1..25: mol_type = other RNA
gaatagcccccggcaacggtggctg

SEQ ID NO: 2305 - RNA, 103 nt, synthetic construct
  misc_feature 1..103: note = Synthetic sequence or unknown origin
  source 1..103: mol_type = other RNA
gttgtgtattgctttcgaaagaagcaatacacaataaggattattccgttgtgaaacttttaaggagggagaatagattttctattctctcgctttctttttt

SEQ ID NO: 2306 - RNA, 16 nt, synthetic construct
  misc_feature 1..16: note = Synthetic sequence or unknown origin
  source 1..16: mol_type = other RNA
gttgtgtattgctttc

SEQ ID NO: 2307 - RNA, 15 nt, synthetic construct
  misc_feature 1..15: note = Synthetic sequence or unknown origin
  source 1..15: mol_type = other RNA
gttgtgtattgcttt

SEQ ID NO: 2308 - RNA, 12 nt, synthetic construct
  misc_feature 1..12: note = Synthetic sequence or unknown origin
  source 1..12: mol_type = other RNA
gttgtgtattgc

SEQ ID NO: 2309 - RNA, 10 nt, synthetic construct
  misc_feature 1..10: note = Synthetic sequence or unknown origin
  source 1..10: mol_type = other RNA
gttgtgtatt

SEQ ID NO: 2310 - RNA, 15 nt, synthetic construct
  misc_feature 1..15: note = Synthetic sequence or unknown origin
  source 1..15: mol_type = other RNA
gaagcaatacacaat

SEQ ID NO: 2311 - RNA, 15 nt, synthetic construct
  misc_feature 1..15: note = Synthetic sequence or unknown origin
  source 1..15: mol_type = other RNA
gaagcaatacacaat

SEQ ID NO: 2312 - RNA, 12 nt, synthetic construct
  misc_feature 1..12: note = Synthetic sequence or unknown origin
  source 1..12: mol_type = other RNA
gcaatacacaat

SEQ ID NO: 2313 - RNA, 10 nt, synthetic construct
  misc_feature 1..10: note = Synthetic sequence or unknown origin
  source 1..10: mol_type = other RNA
aatacacaat

SEQ ID NO: 2314 - RNA, 12 nt, synthetic construct
  misc_feature 1..12: note = Synthetic sequence or unknown origin
  source 1..12: mol_type = other RNA
aaggattattcc

SEQ ID NO: 2315 - RNA, 12 nt, synthetic construct
  misc_feature 1..12: note = Synthetic sequence or unknown origin
  source 1..12: mol_type = other RNA
aaggattattcc

SEQ ID NO: 2316 - RNA, 14 nt, synthetic construct
  misc_feature 1..14: note = Synthetic sequence or unknown origin
  source 1..14: mol_type = other RNA
gttgtgaaactttt

SEQ ID NO: 2317 - RNA, 10 nt, synthetic construct
  misc_feature 1..10: note = Synthetic sequence or unknown origin
  source 1..10: mol_type = other RNA
gttgtgaaac

SEQ ID NO: 2318 - RNA, 42 nt, synthetic construct
  misc_feature 1..42: note = Synthetic sequence or unknown origin
  source 1..42: mol_type = other RNA
aaggagggagaatagattttctattctctcgctttctttttt

SEQ ID NO: 2319 - RNA, 35 nt, synthetic construct
  misc_feature 1..35: note = Synthetic sequence or unknown origin
  source 1..35: mol_type = other RNA
aaggagggagaatagattttctattctctcgcttt

SEQ ID NO: 2320 - RNA, 36 nt, synthetic construct
  misc_feature 1..36: note = Synthetic sequence or unknown origin
  source 1..36: mol_type = other RNA
aaggagggagaatagattttctattctctcgctttc

SEQ ID NO: 2321 - RNA, 103 nt, synthetic construct
  misc_feature 1..103: note = Synthetic sequence or unknown origin
  source 1..103: mol_type = other RNA
gttgtgtattgctttcgaaagaagcaatacacaataaggattattccgttgtgaaacttctaaggagggagaatagatcttctattctctcgctttctttttt

SEQ ID NO: 2322 - RNA, 14 nt, synthetic construct
  misc_feature 1..14: note = Synthetic sequence or unknown origin
  source 1..14: mol_type = other RNA
gttgtgaaacttct

SEQ ID NO: 2323 - RNA, 42 nt, synthetic construct
  misc_feature 1..42: note = Synthetic sequence or unknown origin
  source 1..42: mol_type = other RNA
aaggagggagaatagatcttctattctctcgctttctttttt

SEQ ID NO: 2324 - RNA, 35 nt, synthetic construct
  misc_feature 1..35: note = Synthetic sequence or unknown origin
  source 1..35: mol_type = other RNA
aaggagggagaatagatcttctattctctcgcttt

SEQ ID NO: 2325 - RNA, 36 nt, synthetic construct
  misc_feature 1..36: note = Synthetic sequence or unknown origin
  source 1..36: mol_type = other RNA
aaggagggagaatagatcttctattctctcgctttc

SEQ ID NO: 2326 - RNA, 124 nt, synthetic construct
  misc_feature 1..124: note = Synthetic sequence or unknown origin
  source 1..124: mol_type = other RNA
gttgtgtattgctttcgaaagaagcaatacacaataaggattattccgttgtgaaacttttaaggagggagaatagattttctattctctcgctttcttttattcacgtagcaacacatttttt

SEQ ID NO: 2327 - RNA, 77 nt, synthetic construct
  misc_feature 1..77: note = Synthetic sequence or unknown origin
  source 1..77: mol_type = other RNA
gttgtgaaacttttaaggagggagaatagattttctattctctcgctttcttttattcacgtagcaacacatttttt

SEQ ID NO: 2328 - RNA, 65 nt, synthetic construct
  misc_feature 1..65: note = Synthetic sequence or unknown origin
  source 1..65: mol_type = other RNA
gttgtgaaacttttaaggagggagaatagattttctattctctcgctttcttttattcacgtagc

SEQ ID NO: 2329 - RNA, 71 nt, synthetic construct
  misc_feature 1..71: note = Synthetic sequence or unknown origin
  source 1..71: mol_type = other RNA
gttgtgaaacttttaaggagggagaatagattttctattctctcgctttcttttattcacgtagcaacaca

SEQ ID NO: 2330 - RNA, 124 nt, synthetic construct
  misc_feature 1..124: note = Synthetic sequence or unknown origin
  source 1..124: mol_type = other RNA
gttgtgtattgctttcgaaagaagcaatacacaataaggattattccgttgtgaaacttctaaggagggagaatagatcttctattctctcgctttcttctattcacgtagcaacacatttttt

SEQ ID NO: 2331 - RNA, 77 nt, synthetic construct
  misc_feature 1..77: note = Synthetic sequence or unknown origin
  source 1..77: mol_type = other RNA
gttgtgaaacttctaaggagggagaatagatcttctattctctcgctttcttctattcacgtagcaacacatttttt

SEQ ID NO: 2332 - RNA, 65 nt, synthetic construct
  misc_feature 1..65: note = Synthetic sequence or unknown origin
  source 1..65: mol_type = other RNA
gttgtgaaacttctaaggagggagaatagatcttctattctctcgctttcttctattcacgtagc

SEQ ID NO: 2333 - RNA, 71 nt, synthetic construct
  misc_feature 1..71: note = Synthetic sequence or unknown origin
  source 1..71: mol_type = other RNA
gttgtgaaacttctaaggagggagaatagatcttctattctctcgctttcttctattcacgtagcaacaca

SEQ ID NO: 2334 - RNA, 106 nt, synthetic construct
  misc_feature 1..106: note = Synthetic sequence or unknown origin
  source 1..106: mol_type = other RNA
gtttgagaaccttgtaagaaattacaaggtgagtgcaaataaggattcatccgaaatagtttacccgcattgtgcggtcaaaaaagacttgaaaaagtcttttttt

SEQ ID NO: 2335 - RNA, 17 nt, synthetic construct
  misc_feature 1..17: note = Synthetic sequence or unknown origin
  source 1..17: mol_type = other RNA
gtttgagaaccttgtaa

SEQ ID NO: 2336 - RNA, 15 nt, synthetic construct
  misc_feature 1..15: note = Synthetic sequence or unknown origin
  source 1..15: mol_type = other RNA
gtttgagaaccttgt

SEQ ID NO: 2337 - RNA, 12 nt, synthetic construct
  misc_feature 1..12: note = Synthetic sequence or unknown origin
  source 1..12: mol_type = other RNA
gtttgagaacct

SEQ ID NO: 2338 - RNA, 10 nt, synthetic construct
  misc_feature 1..10: note = Synthetic sequence or unknown origin
  source 1..10: mol_type = other RNA
gtttgagaac

SEQ ID NO: 2339 - RNA, 19 nt, synthetic construct
  misc_feature 1..19: note = Synthetic sequence or unknown origin
  source 1..19: mol_type = other RNA
ttacaaggtgagtgcaaat

SEQ ID NO: 2340 - RNA, 17 nt, synthetic construct
  misc_feature 1..17: note = Synthetic sequence or unknown origin
  source 1..17: mol_type = other RNA
acaaggtgagtgcaaat

SEQ ID NO: 2341 - RNA, 14 nt, synthetic construct
  misc_feature 1..14: note = Synthetic sequence or unknown origin
  source 1..14: mol_type = other RNA
aggtgagtgcaaat

SEQ ID NO: 2342 - RNA, 12 nt, synthetic construct
  misc_feature 1..12: note = Synthetic sequence or unknown origin
  source 1..12: mol_type = other RNA
gtgagtgcaaat

SEQ ID NO: 2343 - RNA, 24 nt, synthetic construct
  misc_feature 1..24: note = Synthetic sequence or unknown origin
  source 1..24: mol_type = other RNA
aaggattcatccgaaatagtttac

SEQ ID NO: 2344 - RNA, 12 nt, synthetic construct
  misc_feature 1..12: note = Synthetic sequence or unknown origin
  source 1..12: mol_type = other RNA
aaggattcatcc

SEQ ID NO: 2345 - RNA, 15 nt, synthetic construct
  misc_feature 1..15: note = Synthetic sequence or unknown origin
  source 1..15: mol_type = other RNA
ccgcattgtgcggtc

SEQ ID NO: 2346 - RNA, 13 nt, synthetic construct
  misc_feature 1..13: note = Synthetic sequence or unknown origin
  source 1..13: mol_type = other RNA
ccgcattgtgcgg

SEQ ID NO: 2347 - RNA, 27 nt, synthetic construct
  misc_feature 1..27: note = Synthetic sequence or unknown origin
  source 1..27: mol_type = other RNA
aaaaaagacttgaaaaagtcttttttt

SEQ ID NO: 2348 - RNA, 26 nt, synthetic construct
  misc_feature 1..26: note = Synthetic sequence or unknown origin
  source 1..26: mol_type = other RNA
aaaaaagacttgaaaaagtctttttt

SEQ ID NO: 2349 - RNA, 20 nt, synthetic construct
  misc_feature 1..20: note = Synthetic sequence or unknown origin
  source 1..20: mol_type = other RNA
aaaaaagacttgaaaaagtc

SEQ ID NO: 2350 - RNA, 117 nt, synthetic construct
  misc_feature 1..117: note = Synthetic sequence or unknown origin
  source 1..117: mol_type = other RNA
gtttgagagtagtgtaagaaattacactacacggttcaaataaagaattttcctaatcgcccttaggggcccacgttgatgtggatgaaaactcgccagctataagcgagttttttt

SEQ ID NO: 2351 - RNA, 17 nt, synthetic construct
  misc_feature 1..17: note = Synthetic sequence or unknown origin
  source 1..17: mol_type = other RNA
gtttgagagtagtgtaa

SEQ ID NO: 2352 - RNA, 15 nt, synthetic construct
  misc_feature 1..15: note = Synthetic sequence or unknown origin
  source 1..15: mol_type = other RNA
gtttgagagtagtgt

SEQ ID NO: 2353 - RNA, 12 nt, synthetic construct
  misc_feature 1..12: note = Synthetic sequence or unknown origin
  source 1..12: mol_type = other RNA
gtttgagagtag

SEQ ID NO: 2354 - RNA, 10 nt, synthetic construct
  misc_feature 1..10: note = Synthetic sequence or unknown origin
  source 1..10: mol_type = other RNA
gtttgagagt

SEQ ID NO: 2355 - RNA, 20 nt, synthetic construct
  misc_feature 1..20: note = Synthetic sequence or unknown origin
  source 1..20: mol_type = other RNA
ttacactacacggttcaaat

SEQ ID NO: 2356 - RNA, 18 nt, synthetic construct
  misc_feature 1..18: note = Synthetic sequence or unknown origin
  source 1..18: mol_type = other RNA
acactacacggttcaaat

SEQ ID NO: 2357 - RNA, 15 nt, synthetic construct
  misc_feature 1..15: note = Synthetic sequence or unknown origin
  source 1..15: mol_type = other RNA
ctacacggttcaaat

SEQ ID NO: 2358 - RNA, 13 nt, synthetic construct
  misc_feature 1..13: note = Synthetic sequence or unknown origin
  source 1..13: mol_type = other RNA
acacggttcaaat

SEQ ID NO: 2359 - RNA, 29 nt, synthetic construct
  misc_feature 1..29: note = Synthetic sequence or unknown origin
  source 1..29: mol_type = other RNA
aaagaattttcctaatcgcccttaggggc

SEQ ID NO: 2360 - RNA, 29 nt, synthetic construct
  misc_feature 1..29: note = Synthetic sequence or unknown origin
  source 1..29: mol_type = other RNA
aaagaattttcctaatcgcccttaggggc

SEQ ID NO: 2361 - RNA, 16 nt, synthetic construct
  misc_feature 1..16: note = Synthetic sequence or unknown origin
  source 1..16: mol_type = other RNA
ccacgttgatgtggat

SEQ ID NO: 2362 - RNA, 14 nt, synthetic construct
  misc_feature 1..14: note = Synthetic sequence or unknown origin
  source 1..14: mol_type = other RNA
ccacgttgatgtgg

SEQ ID NO: 2363 - RNA, 31 nt, synthetic construct
  misc_feature 1..31: note = Synthetic sequence or unknown origin
  source 1..31: mol_type = other RNA
gaaaactcgccagctataagcgagttttttt

SEQ ID NO: 2364 - RNA, 29 nt, synthetic construct
  misc_feature 1..29: note = Synthetic sequence or unknown origin
  source 1..29: mol_type = other RNA
gaaaactcgccagctataagcgagttttt

SEQ ID NO: 2365 - RNA, 24 nt, synthetic construct
  misc_feature 1..24: note = Synthetic sequence or unknown origin
  source 1..24: mol_type = other RNA
gaaaactcgccagctataagcgag

SEQ ID NO: 2366 - RNA, 117 nt, synthetic construct
  misc_feature 1..117: note = Synthetic sequence or unknown origin
  source 1..117: mol_type = other RNA
gtttgagagtagtgtaagaaattacactacacggttcaaataaagaattctcctaatcgcccttaggggcccacgttgatgtggatgaaaactcgccagctataagcgagttttttt

SEQ ID NO: 2367 - RNA, 29 nt, synthetic construct
  misc_feature 1..29: note = Synthetic sequence or unknown origin
  source 1..29: mol_type = other RNA
aaagaattctcctaatcgcccttaggggc

SEQ ID NO: 2368 - RNA, 29 nt, synthetic construct
  misc_feature 1..29: note = Synthetic sequence or unknown origin
  source 1..29: mol_type = other RNA
aaagaattctcctaatcgcccttaggggc

SEQ ID NO: 2369 - RNA, 121 nt, synthetic construct
  misc_feature 1..121: note = Synthetic sequence or unknown origin
  source 1..121: mol_type = other RNA
gtttgagagtagtgtaagaaattacactacgagttcaaataaaaatcttttcaaatcgttcggtttgaccgttcgcacaagtgttgtgcattgatccttgcttttaagcaaggattttttt

SEQ ID NO: 2370 - RNA, 17 nt, synthetic construct
  misc_feature 1..17: note = Synthetic sequence or unknown origin
  source 1..17: mol_type = other RNA
gtttgagagtagtgtaa

SEQ ID NO: 2371 - RNA, 15 nt, synthetic construct
  misc_feature 1..15: note = Synthetic sequence or unknown origin
  source 1..15: mol_type = other RNA
gtttgagagtagtgt

SEQ ID NO: 2372 - RNA, 12 nt, synthetic construct
  misc_feature 1..12: note = Synthetic sequence or unknown origin
  source 1..12: mol_type = other RNA
gtttgagagtag

SEQ ID NO: 2373 - RNA, 10 nt, synthetic construct
  misc_feature 1..10: note = Synthetic sequence or unknown origin
  source 1..10: mol_type = other RNA
gtttgagagt

SEQ ID NO: 2374 - RNA, 19 nt, synthetic construct
  misc_feature 1..19: note = Synthetic sequence or unknown origin
  source 1..19: mol_type = other RNA
ttacactacgagttcaaat

SEQ ID NO: 2375 - RNA, 17 nt, synthetic construct
  misc_feature 1..17: note = Synthetic sequence or unknown origin
  source 1..17: mol_type = other RNA
acactacgagttcaaat

SEQ ID NO: 2376 - RNA, 14 nt, synthetic construct
  misc_feature 1..14: note = Synthetic sequence or unknown origin
  source 1..14: mol_type = other RNA
ctacgagttcaaat

SEQ ID NO: 2377 - RNA, 12 nt, synthetic construct
  misc_feature 1..12: note = Synthetic sequence or unknown origin
  source 1..12: mol_type = other RNA
acgagttcaaat

SEQ ID NO: 2378 - RNA, 34 nt, synthetic construct
  misc_feature 1..34: note = Synthetic sequence or unknown origin
  source 1..34: mol_type = other RNA
aaaaatcttttcaaatcgttcggtttgaccgttc

SEQ ID NO: 2379 - RNA, 28 nt, synthetic construct
  misc_feature 1..28: note = Synthetic sequence or unknown origin
  source 1..28: mol_type = other RNA
aaaaatcttttcaaatcgttcggtttga

SEQ ID NO: 2380 - RNA, 18 nt, synthetic construct
  misc_feature 1..18: note = Synthetic sequence or unknown origin
  source 1..18: mol_type = other RNA
gcacaagtgttgtgcatt

SEQ ID NO: 2381 - RNA, 15 nt, synthetic construct
  misc_feature 1..15: note = Synthetic sequence or unknown origin
  source 1..15: mol_type = other RNA
gcacaagtgttgtgc

SEQ ID NO: 2382 - RNA, 29 nt, synthetic construct
  misc_feature 1..29: note = Synthetic sequence or unknown origin
  source 1..29: mol_type = other RNA
gatccttgcttttaagcaaggattttttt

SEQ ID NO: 2383 - RNA, 24 nt, synthetic construct
  misc_feature 1..24: note = Synthetic sequence or unknown origin
  source 1..24: mol_type = other RNA
gatccttgcttttaagcaaggatt

SEQ ID NO: 2384 - RNA, 22 nt, synthetic construct
  misc_feature 1..22: note = Synthetic sequence or unknown origin
  source 1..22: mol_type = other RNA
gatccttgcttttaagcaagga

SEQ ID NO: 2385 - RNA, 121 nt, synthetic construct
  misc_feature 1..121: note = Synthetic sequence or unknown origin
  source 1..121: mol_type = other RNA
gtttgagagtagtgtaagaaattacactacgagttcaaataaaaatcttctcaaatcgttcggtttgaccgttcgcacaagtgttgtgcattgatccttgctttcaagcaaggattttttt

SEQ ID NO: 2386 - RNA, 34 nt, synthetic construct
  misc_feature 1..34: note = Synthetic sequence or unknown origin
  source 1..34: mol_type = other RNA
aaaaatcttctcaaatcgttcggtttgaccgttc

SEQ ID NO: 2387 - RNA, 28 nt, synthetic construct
  misc_feature 1..28: note = Synthetic sequence or unknown origin
  source 1..28: mol_type = other RNA
aaaaatcttctcaaatcgttcggtttga

SEQ ID NO: 2388 - RNA, 29 nt, synthetic construct
  misc_feature 1..29: note = Synthetic sequence or unknown origin
  source 1..29: mol_type = other RNA
gatccttgctttcaagcaaggattttttt

SEQ ID NO: 2389 - RNA, 24 nt, synthetic construct
  misc_feature 1..24: note = Synthetic sequence or unknown origin
  source 1..24: mol_type = other RNA
gatccttgctttcaagcaaggatt

SEQ ID NO: 2390 - RNA, 22 nt, synthetic construct
  misc_feature 1..22: note = Synthetic sequence or unknown origin
  source 1..22: mol_type = other RNA
gatccttgctttcaagcaagga

SEQ ID NO: 2391 - RNA, 111 nt, synthetic construct
  misc_feature 1..111: note = Synthetic sequence or unknown origin
  source 1..111: mol_type = other RNA
gtttgagagccttgttagaaataacaaggcgagtgcaaataaggtttatccgaaatcgtctattgacgccacacggtgtggcatgaaaaagtcgcgtatgcggcttttttt

SEQ ID NO: 2392 - RNA, 17 nt, synthetic construct
  misc_feature 1..17: note = Synthetic sequence or unknown origin
  source 1..17: mol_type = other RNA
gtttgagagccttgtta

SEQ ID NO: 2393 - RNA, 15 nt, synthetic construct
  misc_feature 1..15: note = Synthetic sequence or unknown origin
  source 1..15: mol_type = other RNA
gtttgagagccttgt

SEQ ID NO: 2394 - RNA, 12 nt, synthetic construct
  misc_feature 1..12: note = Synthetic sequence or unknown origin
  source 1..12: mol_type = other RNA
gtttgagagcct

SEQ ID NO: 2395 - RNA, 10 nt, synthetic construct
  misc_feature 1..10: note = Synthetic sequence or unknown origin
  source 1..10: mol_type = other RNA
gtttgagagc

SEQ ID NO: 2396 - RNA, 19 nt, synthetic construct
  misc_feature 1..19: note = Synthetic sequence or unknown origin
  source 1..19: mol_type = other RNA
taacaaggcgagtgcaaat

SEQ ID NO: 2397 - RNA, 17 nt, synthetic construct
  misc_feature 1..17: note = Synthetic sequence or unknown origin
  source 1..17: mol_type = other RNA
acaaggcgagtgcaaat

SEQ ID NO: 2398 - RNA, 14 nt, synthetic construct
  misc_feature 1..14: note = Synthetic sequence or unknown origin
  source 1..14: mol_type = other RNA
aggcgagtgcaaat

SEQ ID NO: 2399 - RNA, 12 nt, synthetic construct
  misc_feature 1..12: note = Synthetic sequence or unknown origin
  source 1..12: mol_type = other RNA
gcgagtgcaaat

SEQ ID NO: 2400 - RNA, 17 nt, synthetic construct
  misc_feature 1..17: note = Synthetic sequence or unknown origin
  source 1..17: mol_type = other RNA
aaggtttatccgaaatc

SEQ ID NO: 2401 - RNA, 17 nt, synthetic construct
  misc_feature 1..17: note = Synthetic sequence or unknown origin
  source 1..17: mol_type = other RNA
aaggtttatccgaaatc

SEQ ID NO: 2402 - RNA, 10 nt, synthetic construct
  misc_feature 1..10: note = Synthetic sequence or unknown origin
  source 1..10: mol_type = other RNA
gtctattgac

SEQ ID NO: 2403 - RNA, 10 nt, synthetic construct
  misc_feature 1..10: note = Synthetic sequence or unknown origin
  source 1..10: mol_type = other RNA
gtctattgac

SEQ ID NO: 2404 - RNA, 17 nt, synthetic construct
  misc_feature 1..17: note = Synthetic sequence or unknown origin
  source 1..17: mol_type = other RNA
gccacacggtgtggcat

SEQ ID NO: 2405 - RNA, 15 nt, synthetic construct
  misc_feature 1..15: note = Synthetic sequence or unknown origin
  source 1..15: mol_type = other RNA
gccacacggtgtggc

SEQ ID NO: 2406 - RNA, 27 nt, synthetic construct
  misc_feature 1..27: note = Synthetic sequence or unknown origin
  source 1..27: mol_type = other RNA
gaaaaagtcgcgtatgcggcttttttt

SEQ ID NO: 2407 - RNA, 26 nt, synthetic construct
  misc_feature 1..26: note = Synthetic sequence or unknown origin
  source 1..26: mol_type = other RNA
gaaaaagtcgcgtatgcggctttttt

SEQ ID NO: 2408 - RNA, 20 nt, synthetic construct
  misc_feature 1..20: note = Synthetic sequence or unknown origin
  source 1..20: mol_type = other RNA
gaaaaagtcgcgtatgcggc

SEQ ID NO: 2409 - RNA, 89 nt, synthetic construct
  misc_feature 1..89: note = Synthetic sequence or unknown origin
  source 1..89: mol_type = other RNA
gtttgagagccttgttagaaataacaaggcgagtgcaaataaggtttatccgaaatcgtctattgacgccacacggtgtggcatttttt

SEQ ID NO: 2410 - RNA, 22 nt, synthetic construct
  misc_feature 1..22: note = Synthetic sequence or unknown origin
  source 1..22: mol_type = other RNA
gccacacggtgtggcatttttt

SEQ ID NO: 2411 - RNA, 16 nt, synthetic construct
  misc_feature 1..16: note = Synthetic sequence or unknown origin
  source 1..16: mol_type = other RNA
gccacacggtgtggca

SEQ ID NO: 2412 - RNA, 91 nt, synthetic construct
  misc_feature 1..91: note = Synthetic sequence or unknown origin
  source 1..91: mol_type = other RNA
gttttggggcagcgtcagaaatgacgctgcgagtcaaaataaaggtttaccctaattgcccgtttcgggtttcgcttaagcgaaatttttt

SEQ ID NO: 2413 - RNA, 17 nt, synthetic construct
  misc_feature 1..17: note = Synthetic sequence or unknown origin
  source 1..17: mol_type = other RNA
gttttggggcagcgtca

SEQ ID NO: 2414 - RNA, 15 nt, synthetic construct
  misc_feature 1..15: note = Synthetic sequence or unknown origin
  source 1..15: mol_type = other RNA
gttttggggcagcgt

SEQ ID NO: 2415 - RNA, 12 nt, synthetic construct
  misc_feature 1..12: note = Synthetic sequence or unknown origin
  source 1..12: mol_type = other RNA
gttttggggcag

SEQ ID NO: 2416 - RNA, 10 nt, synthetic construct
  misc_feature 1..10: note = Synthetic sequence or unknown origin
  source 1..10: mol_type = other RNA
gttttggggc

SEQ ID NO: 2417 - RNA, 19 nt, synthetic construct
  misc_feature 1..19: note = Synthetic sequence or unknown origin
  source 1..19: mol_type = other RNA
tgacgctgcgagtcaaaat

SEQ ID NO: 2418 - RNA, 17 nt, synthetic construct
  misc_feature 1..17: note = Synthetic sequence or unknown origin
  source 1..17: mol_type = other RNA
acgctgcgagtcaaaat

SEQ ID NO: 2419 - RNA, 14 nt, synthetic construct
  misc_feature 1..14: note = Synthetic sequence or unknown origin
  source 1..14: mol_type = other RNA
ctgcgagtcaaaat

SEQ ID NO: 2420 - RNA, 12 nt, synthetic construct
  misc_feature 1..12: note = Synthetic sequence or unknown origin
  source 1..12: mol_type = other RNA
gcgagtcaaaat

SEQ ID NO: 2421 - RNA, 17 nt, synthetic construct
  misc_feature 1..17: note = Synthetic sequence or unknown origin
  source 1..17: mol_type = other RNA
aaaggtttaccctaatt

SEQ ID NO: 2422 - RNA, 13 nt, synthetic construct
  misc_feature 1..13: note = Synthetic sequence or unknown origin
  source 1..13: mol_type = other RNA
aaaggtttaccct

SEQ ID NO: 2423 - RNA, 13 nt, synthetic construct
  misc_feature 1..13: note = Synthetic sequence or unknown origin
  source 1..13: mol_type = other RNA
gcccgtttcgggt

SEQ ID NO: 2424 - RNA, 13 nt, synthetic construct
  misc_feature 1..13: note = Synthetic sequence or unknown origin
  source 1..13: mol_type = other RNA
gcccgtttcgggt

SEQ ID NO: 2425 - RNA, 21 nt, synthetic construct
  misc_feature 1..21: note = Synthetic sequence or unknown origin
  source 1..21: mol_type = other RNA
ttcgcttaagcgaaatttttt

SEQ ID NO: 2426 - RNA, 14 nt, synthetic construct
  misc_feature 1..14: note = Synthetic sequence or unknown origin
  source 1..14: mol_type = other RNA
ttcgcttaagcgaa

SEQ ID NO: 2427 - RNA, 15 nt, synthetic construct
  misc_feature 1..15: note = Synthetic sequence or unknown origin
  source 1..15: mol_type = other RNA
ttcgcttaagcgaaa

SEQ ID NO: 2428 - RNA, 91 nt, synthetic construct
  misc_feature 1..91: note = Synthetic sequence or unknown origin
  source 1..91: mol_type = other RNA
gttctggggcagcgtcagaaatgacgctgcgagtcagaataaaggtttaccctaattgcccgtttcgggtttcgcttaagcgaaatttttt

SEQ ID NO: 2429 - RNA, 17 nt, synthetic construct
  misc_feature 1..17: note = Synthetic sequence or unknown origin
  source 1..17: mol_type = other RNA
gttctggggcagcgtca

SEQ ID NO: 2430 - RNA, 15 nt, synthetic construct
  misc_feature 1..15: note = Synthetic sequence or unknown origin
  source 1..15: mol_type = other RNA
gttctggggcagcgt

SEQ ID NO: 2431 - RNA, 12 nt, synthetic construct
  misc_feature 1..12: note = Synthetic sequence or unknown origin
  source 1..12: mol_type = other RNA
gttctggggcag

SEQ ID NO: 2432 - RNA, 10 nt, synthetic construct
  misc_feature 1..10: note = Synthetic sequence or unknown origin
  source 1..10: mol_type = other RNA
gttctggggc

SEQ ID NO: 2433 - RNA, 19 nt, synthetic construct
  misc_feature 1..19: note = Synthetic sequence or unknown origin
  source 1..19: mol_type = other RNA
tgacgctgcgagtcagaat

SEQ ID NO: 2434 - RNA, 17 nt, synthetic construct
  misc_feature 1..17: note = Synthetic sequence or unknown origin
  source 1..17: mol_type = other RNA
acgctgcgagtcagaat

SEQ ID NO: 2435 - RNA, 14 nt, synthetic construct
  misc_feature 1..14: note = Synthetic sequence or unknown origin
  source 1..14: mol_type = other RNA
ctgcgagtcagaat

SEQ ID NO: 2436 - RNA, 12 nt, synthetic construct
  misc_feature 1..12: note = Synthetic sequence or unknown origin
  source 1..12: mol_type = other RNA
gcgagtcagaat

SEQ ID NO: 2437 - RNA, 126 nt, synthetic construct
  misc_feature 1..126: note = Synthetic sequence or unknown origin
  source 1..126: mol_type = other RNA
gttgggaattgctttcaaagaaaggagaaagacttttctcaataaggctataagccgaagatgtctaacagcctgcgttgtcgtgggaactgtggaaaccctgcatctttagaagcagggtttttt

SEQ ID NO: 2438 - RNA, 19 nt, synthetic construct
  misc_feature 1..19: note = Synthetic sequence or unknown origin
  source 1..19: mol_type = other RNA
gttgggaattgctttcaaa

SEQ ID NO: 2439 - RNA, 15 nt, synthetic construct
  misc_feature 1..15: note = Synthetic sequence or unknown origin
  source 1..15: mol_type = other RNA
gttgggaattgcttt

SEQ ID NO: 2440 - RNA, 12 nt, synthetic construct
  misc_feature 1..12: note = Synthetic sequence or unknown origin
  source 1..12: mol_type = other RNA
gttgggaattgc

SEQ ID NO: 2441 - RNA, 10 nt, synthetic construct
  misc_feature 1..10: note = Synthetic sequence or unknown origin
  source 1..10: mol_type = other RNA
gttgggaatt

SEQ ID NO: 2442 - RNA, 20 nt, synthetic construct
  misc_feature 1..20: note = Synthetic sequence or unknown origin
  source 1..20: mol_type = other RNA
ggagaaagacttttctcaat

SEQ ID NO: 2443 - RNA, 16 nt, synthetic construct
  misc_feature 1..16: note = Synthetic sequence or unknown origin
  source 1..16: mol_type = other RNA
aaagacttttctcaat

SEQ ID NO: 2444 - RNA, 13 nt, synthetic construct
  misc_feature 1..13: note = Synthetic sequence or unknown origin
  source 1..13: mol_type = other RNA
gacttttctcaat

SEQ ID NO: 2445 - RNA, 10 nt, synthetic construct
  misc_feature 1..10: note = Synthetic sequence or unknown origin
  source 1..10: mol_type = other RNA
ttttctcaat

SEQ ID NO: 2446 - RNA, 24 nt, synthetic construct
  misc_feature 1..24: note = Synthetic sequence or unknown origin
  source 1..24: mol_type = other RNA
aaggctataagccgaagatgtcta

SEQ ID NO: 2447 - RNA, 13 nt, synthetic construct
  misc_feature 1..13: note = Synthetic sequence or unknown origin
  source 1..13: mol_type = other RNA
aaggctataagcc

SEQ ID NO: 2448 - RNA, 26 nt, synthetic construct
  misc_feature 1..26: note = Synthetic sequence or unknown origin
  source 1..26: mol_type = other RNA
acagcctgcgttgtcgtgggaactgt

SEQ ID NO: 2449 - RNA, 26 nt, synthetic construct
  misc_feature 1..26: note = Synthetic sequence or unknown origin
  source 1..26: mol_type = other RNA
acagcctgcgttgtcgtgggaactgt

SEQ ID NO: 2450 - RNA, 33 nt, synthetic construct
  misc_feature 1..33: note = Synthetic sequence or unknown origin
  source 1..33: mol_type = other RNA
ggaaaccctgcatctttagaagcagggtttttt

SEQ ID NO: 2451 - RNA, 32 nt, synthetic construct
  misc_feature 1..32: note = Synthetic sequence or unknown origin
  source 1..32: mol_type = other RNA
ggaaaccctgcatctttagaagcagggttttt

SEQ ID NO: 2452 - RNA, 27 nt, synthetic construct
  misc_feature 1..27: note = Synthetic sequence or unknown origin
  source 1..27: mol_type = other RNA
ggaaaccctgcatctttagaagcaggg

SEQ ID NO: 2453 - RNA, 132 nt, synthetic construct
  misc_feature 1..132: note = Synthetic sequence or unknown origin
  source 1..132: mol_type = other RNA
gtctaggagtagtgctggaaacggcactacaagtctagataaaaatttattcaaagcaccgtttaggcggtaccccgttgtggggacataattcagcccgaatatttggttattcgggctgaattatttttt

SEQ ID NO: 2454 - RNA, 17 nt, synthetic construct
  misc_feature 1..17: note = Synthetic sequence or unknown origin
  source 1..17: mol_type = other RNA
gtctaggagtagtgctg

SEQ ID NO: 2455 - RNA, 15 nt, synthetic construct
  misc_feature 1..15: note = Synthetic sequence or unknown origin
  source 1..15: mol_type = other RNA
gtctaggagtagtgc

SEQ ID NO: 2456 - RNA, 12 nt, synthetic construct
  misc_feature 1..12: note = Synthetic sequence or unknown origin
  source 1..12: mol_type = other RNA
gtctaggagtag

SEQ ID NO: 2457 - RNA, 10 nt, synthetic construct
  misc_feature 1..10: note = Synthetic sequence or unknown origin
  source 1..10: mol_type = other RNA
gtctaggagt

SEQ ID NO: 2458 - RNA, 19 nt, synthetic construct
  misc_feature 1..19: note = Synthetic sequence or unknown origin
  source 1..19: mol_type = other RNA
cggcactacaagtctagat

SEQ ID NO: 2459 - RNA, 17 nt, synthetic construct
  misc_feature 1..17: note = Synthetic sequence or unknown origin
  source 1..17: mol_type = other RNA
gcactacaagtctagat

SEQ ID NO: 2460 - RNA, 14 nt, synthetic construct
  misc_feature 1..14: note = Synthetic sequence or unknown origin
  source 1..14: mol_type = other RNA
ctacaagtctagat

SEQ ID NO: 2461 - RNA, 12 nt, synthetic construct
  misc_feature 1..12: note = Synthetic sequence or unknown origin
  source 1..12: mol_type = other RNA
acaagtctagat

SEQ ID NO: 2462 - RNA, 32 nt, synthetic construct
  misc_feature 1..32: note = Synthetic sequence or unknown origin
  source 1..32: mol_type = other RNA
aaaaatttattcaaagcaccgtttaggcggta

SEQ ID NO: 2463 - RNA, 31 nt, synthetic construct
  misc_feature 1..31: note = Synthetic sequence or unknown origin
  source 1..31: mol_type = other RNA
aaaaatttattcaaagcaccgtttaggcggt

SEQ ID NO: 2464 - RNA, 15 nt, synthetic construct
  misc_feature 1..15: note = Synthetic sequence or unknown origin
  source 1..15: mol_type = other RNA
ccccgttgtggggac

SEQ ID NO: 2465 - RNA, 13 nt, synthetic construct
  misc_feature 1..13: note = Synthetic sequence or unknown origin
  source 1..13: mol_type = other RNA
ccccgttgtgggg

SEQ ID NO: 2466 - RNA, 45 nt, synthetic construct
  misc_feature 1..45: note = Synthetic sequence or unknown origin
  source 1..45: mol_type = other RNA
ataattcagcccgaatatttggttattcgggctgaattatttttt

SEQ ID NO: 2467 - RNA, 40 nt, synthetic construct
  misc_feature 1..40: note = Synthetic sequence or unknown origin
  source 1..40: mol_type = other RNA
ataattcagcccgaatatttggttattcgggctgaattat

SEQ ID NO: 2468 - RNA, 39 nt, synthetic construct
  misc_feature 1..39: note = Synthetic sequence or unknown origin
  source 1..39: mol_type = other RNA
ataattcagcccgaatatttggttattcgggctgaatta

SEQ ID NO: 2469 - RNA, 87 nt, synthetic construct
  misc_feature 1..87: note = Synthetic sequence or unknown origin
  source 1..87: mol_type = other RNA
gttgtgacttgcttgagaaatcaagcaagtcacaataaggattattccgttgtgaaaacattagggcggggcaactcgccttttttt

SEQ ID NO: 2470 - RNA, 16 nt, synthetic construct
  misc_feature 1..16: note = Synthetic sequence or unknown origin
  source 1..16: mol_type = other RNA
gttgtgacttgcttga

SEQ ID NO: 2471 - RNA, 15 nt, synthetic construct
  misc_feature 1..15: note = Synthetic sequence or unknown origin
  source 1..15: mol_type = other RNA
gttgtgacttgcttg

SEQ ID NO: 2472 - RNA, 12 nt, synthetic construct
  misc_feature 1..12: note = Synthetic sequence or unknown origin
  source 1..12: mol_type = other RNA
gttgtgacttgc

SEQ ID NO: 2473 - RNA, 10 nt, synthetic construct
  misc_feature 1..10: note = Synthetic sequence or unknown origin
  source 1..10: mol_type = other RNA
gttgtgactt

SEQ ID NO: 2474 - RNA, 16 nt, synthetic construct
  misc_feature 1..16: note = Synthetic sequence or unknown origin
  source 1..16: mol_type = other RNA
tcaagcaagtcacaat

SEQ ID NO: 2475 - RNA, 15 nt, synthetic construct
  misc_feature 1..15: note = Synthetic sequence or unknown origin
  source 1..15: mol_type = other RNA
caagcaagtcacaat

SEQ ID NO: 2476 - RNA, 12 nt, synthetic construct
  misc_feature 1..12: note = Synthetic sequence or unknown origin
  source 1..12: mol_type = other RNA
gcaagtcacaat

SEQ ID NO: 2477 - RNA, 10 nt, synthetic construct
  misc_feature 1..10: note = Synthetic sequence or unknown origin
  source 1..10: mol_type = other RNA
aagtcacaat

SEQ ID NO: 2478 - RNA, 14 nt, synthetic construct
  misc_feature 1..14: note = Synthetic sequence or unknown origin
  source 1..14: mol_type = other RNA
aaggattattccgt

SEQ ID NO: 2479 - RNA, 12 nt, synthetic construct
  misc_feature 1..12: note = Synthetic sequence or unknown origin
  source 1..12: mol_type = other RNA
aaggattattcc

SEQ ID NO: 2480 - RNA, 12 nt, synthetic construct
  misc_feature 1..12: note = Synthetic sequence or unknown origin
  source 1..12: mol_type = other RNA
tgtgaaaacatt

SEQ ID NO: 2481 - RNA, 10 nt, synthetic construct
  misc_feature 1..10: note = Synthetic sequence or unknown origin
  source 1..10: mol_type = other RNA
tgtgaaaaca

SEQ ID NO: 2482 - RNA, 25 nt, synthetic construct
  misc_feature 1..25: note = Synthetic sequence or unknown origin
  source 1..25: mol_type = other RNA
agggcggggcaactcgccttttttt

SEQ ID NO: 2483 - RNA, 20 nt, synthetic construct
  misc_feature 1..20: note = Synthetic sequence or unknown origin
  source 1..20: mol_type = other RNA
agggcggggcaactcgcctt

SEQ ID NO: 2484 - RNA, 18 nt, synthetic construct
  misc_feature 1..18: note = Synthetic sequence or unknown origin
  source 1..18: mol_type = other RNA
agggcggggcaactcgcc

SEQ ID NO: 2485 - RNA, 87 nt, synthetic construct
  misc_feature 1..87: note = Synthetic sequence or unknown origin
  source 1..87: mol_type = other RNA
gttgtgatttgcttacgaaataagcaaatcacaataaggattattccgttgtgaaaacattcaaggcggggcaactcgccttttttt

SEQ ID NO: 2486 - RNA, 16 nt, synthetic construct
  misc_feature 1..16: note = Synthetic sequence or unknown origin
  source 1..16: mol_type = other RNA
gttgtgatttgcttac

SEQ ID NO: 2487 - RNA, 15 nt, synthetic construct
  misc_feature 1..15: note = Synthetic sequence or unknown origin
  source 1..15: mol_type = other RNA
gttgtgatttgctta

SEQ ID NO: 2488 - RNA, 12 nt, synthetic construct
  misc_feature 1..12: note = Synthetic sequence or unknown origin
  source 1..12: mol_type = other RNA
gttgtgatttgc

SEQ ID NO: 2489 - RNA, 10 nt, synthetic construct
  misc_feature 1..10: note = Synthetic sequence or unknown origin
  source 1..10: mol_type = other RNA
gttgtgattt

SEQ ID NO: 2490 - RNA, 15 nt, synthetic construct
  misc_feature 1..15: note = Synthetic sequence or unknown origin
  source 1..15: mol_type = other RNA
taagcaaatcacaat

SEQ ID NO: 2491 - RNA, 15 nt, synthetic construct
  misc_feature 1..15: note = Synthetic sequence or unknown origin
  source 1..15: mol_type = other RNA
taagcaaatcacaat

SEQ ID NO: 2492 - RNA, 12 nt, synthetic construct
  misc_feature 1..12: note = Synthetic sequence or unknown origin
  source 1..12: mol_type = other RNA
gcaaatcacaat

SEQ ID NO: 2493 - RNA, 10 nt, synthetic construct
  misc_feature 1..10: note = Synthetic sequence or unknown origin
  source 1..10: mol_type = other RNA
aaatcacaat

SEQ ID NO: 2494 - RNA, 14 nt, synthetic construct
  misc_feature 1..14: note = Synthetic sequence or unknown origin
  source 1..14: mol_type = other RNA
aaggattattccgt

SEQ ID NO: 2495 - RNA, 12 nt, synthetic construct
  misc_feature 1..12: note = Synthetic sequence or unknown origin
  source 1..12: mol_type = other RNA
aaggattattcc

SEQ ID NO: 2496 - RNA, 13 nt, synthetic construct
  misc_feature 1..13: note = Synthetic sequence or unknown origin
  source 1..13: mol_type = other RNA
tgtgaaaacattc

SEQ ID NO: 2497 - RNA, 10 nt, synthetic construct
  misc_feature 1..10: note = Synthetic sequence or unknown origin
  source 1..10: mol_type = other RNA
tgtgaaaaca

SEQ ID NO: 2498 - RNA, 25 nt, synthetic construct
  misc_feature 1..25: note = Synthetic sequence or unknown origin
  source 1..25: mol_type = other RNA
aaggcggggcaactcgccttttttt

SEQ ID NO: 2499 - RNA, 20 nt, synthetic construct
  misc_feature 1..20: note = Synthetic sequence or unknown origin
  source 1..20: mol_type = other RNA
aaggcggggcaactcgcctt

SEQ ID NO: 2500 - RNA, 18 nt, synthetic construct
  misc_feature 1..18: note = Synthetic sequence or unknown origin
  source 1..18: mol_type = other RNA
aaggcggggcaactcgcc

SEQ ID NO: 2501 - RNA, 138 nt, synthetic construct
  misc_feature 1..138: note = Synthetic sequence or unknown origin
  source 1..138: mol_type = other RNA
gttttggcgcagtgtcggaaacgatactgcgagtcaaaataacggcttttgcctaaaatgtctcgattcaatcgagacgctccggagggagctatctgacttgcataaggcatccaagcgttcttggatgcctttttt

SEQ ID NO: 2502 - RNA, 17 nt, synthetic construct
  misc_feature 1..17: note = Synthetic sequence or unknown origin
  source 1..17: mol_type = other RNA
gttttggcgcagtgtcg

SEQ ID NO: 2503 - RNA, 15 nt, synthetic construct
  misc_feature 1..15: note = Synthetic sequence or unknown origin
  source 1..15: mol_type = other RNA
gttttggcgcagtgt

SEQ ID NO: 2504 - RNA, 12 nt, synthetic construct
  misc_feature 1..12: note = Synthetic sequence or unknown origin
  source 1..12: mol_type = other RNA
gttttggcgcag

SEQ ID NO: 2505 - RNA, 10 nt, synthetic construct
  misc_feature 1..10: note = Synthetic sequence or unknown origin
  source 1..10: mol_type = other RNA
gttttggcgc

SEQ ID NO: 2506 - RNA, 19 nt, synthetic construct
  misc_feature 1..19: note = Synthetic sequence or unknown origin
  source 1..19: mol_type = other RNA
cgatactgcgagtcaaaat

SEQ ID NO: 2507 - RNA, 17 nt, synthetic construct
  misc_feature 1..17: note = Synthetic sequence or unknown origin
  source 1..17: mol_type = other RNA
atactgcgagtcaaaat

SEQ ID NO: 2508 - RNA, 14 nt, synthetic construct
  misc_feature 1..14: note = Synthetic sequence or unknown origin
  source 1..14: mol_type = other RNA
ctgcgagtcaaaat

SEQ ID NO: 2509 - RNA, 12 nt, synthetic construct
  misc_feature 1..12: note = Synthetic sequence or unknown origin
  source 1..12: mol_type = other RNA
gcgagtcaaaat

SEQ ID NO: 2510 - RNA, 19 nt, synthetic construct
  misc_feature 1..19: note = Synthetic sequence or unknown origin
  source 1..19: mol_type = other RNA
aacggcttttgcctaaaat

SEQ ID NO: 2511 - RNA, 13 nt, synthetic construct
  misc_feature 1..13: note = Synthetic sequence or unknown origin
  source 1..13: mol_type = other RNA
aacggcttttgcc

SEQ ID NO: 2512 - RNA, 19 nt, synthetic construct
  misc_feature 1..19: note = Synthetic sequence or unknown origin
  source 1..19: mol_type = other RNA
gtctcgattcaatcgagac

SEQ ID NO: 2513 - RNA, 19 nt, synthetic construct
  misc_feature 1..19: note = Synthetic sequence or unknown origin
  source 1..19: mol_type = other RNA
gtctcgattcaatcgagac

SEQ ID NO: 2514 - RNA, 28 nt, synthetic construct
  misc_feature 1..28: note = Synthetic sequence or unknown origin
  source 1..28: mol_type = other RNA
gctccggagggagctatctgacttgcat

SEQ ID NO: 2515 - RNA, 14 nt, synthetic construct
  misc_feature 1..14: note = Synthetic sequence or unknown origin
  source 1..14: mol_type = other RNA
gctccggagggagc

SEQ ID NO: 2516 - RNA, 32 nt, synthetic construct
  misc_feature 1..32: note = Synthetic sequence or unknown origin
  source 1..32: mol_type = other RNA
aaggcatccaagcgttcttggatgcctttttt

SEQ ID NO: 2517 - RNA, 28 nt, synthetic construct
  misc_feature 1..28: note = Synthetic sequence or unknown origin
  source 1..28: mol_type = other RNA
aaggcatccaagcgttcttggatgcctt

SEQ ID NO: 2518 - RNA, 26 nt, synthetic construct
  misc_feature 1..26: note = Synthetic sequence or unknown origin
  source 1..26: mol_type = other RNA
aaggcatccaagcgttcttggatgcc

SEQ ID NO: 2519 - RNA, 138 nt, synthetic construct
  misc_feature 1..138: note = Synthetic sequence or unknown origin
  source 1..138: mol_type = other RNA
gttctggcgcagtgtcggaaacgatactgcgagtcagaataacggcttctgcctaaaatgtctcgattcaatcgagacgctccggagggagctatctgacttgcataaggcatccaagcgttcttggatgcctttttt

SEQ ID NO: 2520 - RNA, 17 nt, synthetic construct
  misc_feature 1..17: note = Synthetic sequence or unknown origin
  source 1..17: mol_type = other RNA
gttctggcgcagtgtcg

SEQ ID NO: 2521 - RNA, 15 nt, synthetic construct
  misc_feature 1..15: note = Synthetic sequence or unknown origin
  source 1..15: mol_type = other RNA
gttctggcgcagtgt

SEQ ID NO: 2522 - RNA, 12 nt, synthetic construct
  misc_feature 1..12: note = Synthetic sequence or unknown origin
  source 1..12: mol_type = other RNA
gttctggcgcag

SEQ ID NO: 2523 - RNA, 10 nt, synthetic construct
  misc_feature 1..10: note = Synthetic sequence or unknown origin
  source 1..10: mol_type = other RNA
gttctggcgc

SEQ ID NO: 2524 - RNA, 19 nt, synthetic construct
  misc_feature 1..19: note = Synthetic sequence or unknown origin
  source 1..19: mol_type = other RNA
cgatactgcgagtcagaat

SEQ ID NO: 2525 - RNA, 17 nt, synthetic construct
  misc_feature 1..17: note = Synthetic sequence or unknown origin
  source 1..17: mol_type = other RNA
atactgcgagtcagaat

SEQ ID NO: 2526 - RNA, 14 nt, synthetic construct
  misc_feature 1..14: note = Synthetic sequence or unknown origin
  source 1..14: mol_type = other RNA
ctgcgagtcagaat

SEQ ID NO: 2527 - RNA, 12 nt, synthetic construct
  misc_feature 1..12: note = Synthetic sequence or unknown origin
  source 1..12: mol_type = other RNA
gcgagtcagaat

SEQ ID NO: 2528 - RNA, 19 nt, synthetic construct
  misc_feature 1..19: note = Synthetic sequence or unknown origin
  source 1..19: mol_type = other RNA
aacggcttctgcctaaaat

SEQ ID NO: 2529 - RNA, 13 nt, synthetic construct
  misc_feature 1..13: note = Synthetic sequence or unknown origin
  source 1..13: mol_type = other RNA
aacggcttctgcc

SEQ ID NO: 2530 - RNA, 84 nt, synthetic construct
  misc_feature 1..84: note = Synthetic sequence or unknown origin
  source 1..84: mol_type = other RNA
gttttggcgcagtgtcggaaacgatactgcgagtcaaaataacggcttttgcctaaaatgtctcgattcaatcgagactttttt

SEQ ID NO: 2531 - RNA, 14 nt, synthetic construct
  misc_feature 1..14: note = Synthetic sequence or unknown origin
  source 1..14: mol_type = other RNA
aacggcttttgcct

SEQ ID NO: 2532 - RNA, 30 nt, synthetic construct
  misc_feature 1..30: note = Synthetic sequence or unknown origin
  source 1..30: mol_type = other RNA
aaaatgtctcgattcaatcgagactttttt

SEQ ID NO: 2533 - RNA, 29 nt, synthetic construct
  misc_feature 1..29: note = Synthetic sequence or unknown origin
  source 1..29: mol_type = other RNA
aaaatgtctcgattcaatcgagacttttt

SEQ ID NO: 2534 - RNA, 24 nt, synthetic construct
  misc_feature 1..24: note = Synthetic sequence or unknown origin
  source 1..24: mol_type = other RNA
aaaatgtctcgattcaatcgagac

SEQ ID NO: 2535 - RNA, 84 nt, synthetic construct
  misc_feature 1..84: note = Synthetic sequence or unknown origin
  source 1..84: mol_type = other RNA
gttctggcgcagtgtcggaaacgatactgcgagtcagaataacggcttctgcctaaaatgtctcgattcaatcgagactttttt

SEQ ID NO: 2536 - RNA, 14 nt, synthetic construct
  misc_feature 1..14: note = Synthetic sequence or unknown origin
  source 1..14: mol_type = other RNA
aacggcttctgcct

SEQ ID NO: 2537 - RNA, 88 nt, synthetic construct
  misc_feature 1..88: note = Synthetic sequence or unknown origin
  source 1..88: mol_type = other RNA
gttgtgattagctagagaaatctagctaatcacaataaggattattccgttgtgaaaacattacgggtggggtgactcaccctttttt

SEQ ID NO: 2538 - RNA, 16 nt, synthetic construct
  misc_feature 1..16: note = Synthetic sequence or unknown origin
  source 1..16: mol_type = other RNA
gttgtgattagctaga

SEQ ID NO: 2539 - RNA, 15 nt, synthetic construct
  misc_feature 1..15: note = Synthetic sequence or unknown origin
  source 1..15: mol_type = other RNA
gttgtgattagctag

SEQ ID NO: 2540 - RNA, 12 nt, synthetic construct
  misc_feature 1..12: note = Synthetic sequence or unknown origin
  source 1..12: mol_type = other RNA
gttgtgattagc

SEQ ID NO: 2541 - RNA, 10 nt, synthetic construct
  misc_feature 1..10: note = Synthetic sequence or unknown origin
  source 1..10: mol_type = other RNA
gttgtgatta

SEQ ID NO: 2542 - RNA, 16 nt, synthetic construct
  misc_feature 1..16: note = Synthetic sequence or unknown origin
  source 1..16: mol_type = other RNA
tctagctaatcacaat

SEQ ID NO: 2543 - RNA, 15 nt, synthetic construct
  misc_feature 1..15: note = Synthetic sequence or unknown origin
  source 1..15: mol_type = other RNA
ctagctaatcacaat

SEQ ID NO: 2544 - RNA, 12 nt, synthetic construct
  misc_feature 1..12: note = Synthetic sequence or unknown origin
  source 1..12: mol_type = other RNA
gctaatcacaat

SEQ ID NO: 2545 - RNA, 10 nt, synthetic construct
  misc_feature 1..10: note = Synthetic sequence or unknown origin
  source 1..10: mol_type = other RNA
taatcacaat

SEQ ID NO: 2546 - RNA, 12 nt, synthetic construct
  misc_feature 1..12: note = Synthetic sequence or unknown origin
  source 1..12: mol_type = other RNA
aaggattattcc

SEQ ID NO: 2547 - RNA, 12 nt, synthetic construct
  misc_feature 1..12: note = Synthetic sequence or unknown origin
  source 1..12: mol_type = other RNA
aaggattattcc

SEQ ID NO: 2548 - RNA, 16 nt, synthetic construct
  misc_feature 1..16: note = Synthetic sequence or unknown origin
  source 1..16: mol_type = other RNA
gttgtgaaaacattac

SEQ ID NO: 2549 - RNA, 16 nt, synthetic construct
  misc_feature 1..16: note = Synthetic sequence or unknown origin
  source 1..16: mol_type = other RNA
gttgtgaaaacattac

SEQ ID NO: 2550 - RNA, 24 nt, synthetic construct
  misc_feature 1..24: note = Synthetic sequence or unknown origin
  source 1..24: mol_type = other RNA
gggtggggtgactcaccctttttt

SEQ ID NO: 2551 - RNA, 18 nt, synthetic construct
  misc_feature 1..18: note = Synthetic sequence or unknown origin
  source 1..18: mol_type = other RNA
gggtggggtgactcaccc

SEQ ID NO: 2552 - RNA, 18 nt, synthetic construct
  misc_feature 1..18: note = Synthetic sequence or unknown origin
  source 1..18: mol_type = other RNA
gggtggggtgactcaccc

SEQ ID NO: 2553 - RNA, 103 nt, synthetic construct
  misc_feature 1..103: note = Synthetic sequence or unknown origin
  source 1..103: mol_type = other RNA
gttgtgatttgctttcgaaagaagcaaatcacaataaggattattccgttgtgaaaacattaggttgctctcgtcctttaacgggagcatttttttgtttttt

SEQ ID NO: 2554 - RNA, 16 nt, synthetic construct
  misc_feature 1..16: note = Synthetic sequence or unknown origin
  source 1..16: mol_type = other RNA
gttgtgatttgctttc

SEQ ID NO: 2555 - RNA, 15 nt, synthetic construct
  misc_feature 1..15: note = Synthetic sequence or unknown origin
  source 1..15: mol_type = other RNA
gttgtgatttgcttt

SEQ ID NO: 2556 - RNA, 12 nt, synthetic construct
  misc_feature 1..12: note = Synthetic sequence or unknown origin
  source 1..12: mol_type = other RNA
gttgtgatttgc

SEQ ID NO: 2557 - RNA, 10 nt, synthetic construct
  misc_feature 1..10: note = Synthetic sequence or unknown origin
  source 1..10: mol_type = other RNA
gttgtgattt

SEQ ID NO: 2558 - RNA, 15 nt, synthetic construct
  misc_feature 1..15: note = Synthetic sequence or unknown origin
  source 1..15: mol_type = other RNA
gaagcaaatcacaat

SEQ ID NO: 2559 - RNA, 15 nt, synthetic construct
  misc_feature 1..15: note = Synthetic sequence or unknown origin
  source 1..15: mol_type = other RNA
gaagcaaatcacaat

SEQ ID NO: 2560 - RNA, 12 nt, synthetic construct
  misc_feature 1..12: note = Synthetic sequence or unknown origin
  source 1..12: mol_type = other RNA
gcaaatcacaat

SEQ ID NO: 2561 - RNA, 10 nt, synthetic construct
  misc_feature 1..10: note = Synthetic sequence or unknown origin
  source 1..10: mol_type = other RNA
aaatcacaat

SEQ ID NO: 2562 - RNA, 17 nt, synthetic construct
  misc_feature 1..17: note = Synthetic sequence or unknown origin
  source 1..17: mol_type = other RNA
aaggattattccgttgt

SEQ ID NO: 2563 - RNA, 12 nt, synthetic construct
  misc_feature 1..12: note = Synthetic sequence or unknown origin
  source 1..12: mol_type = other RNA
aaggattattcc

SEQ ID NO: 2564 - RNA, 51 nt, synthetic construct
  misc_feature 1..51: note = Synthetic sequence or unknown origin
  source 1..51: mol_type = other RNA
gaaaacattaggttgctctcgtcctttaacgggagcatttttttgtttttt

SEQ ID NO: 2565 - RNA, 50 nt, synthetic construct
  misc_feature 1..50: note = Synthetic sequence or unknown origin
  source 1..50: mol_type = other RNA
gaaaacattaggttgctctcgtcctttaacgggagcatttttttgttttt

SEQ ID NO: 2566 - RNA, 45 nt, synthetic construct
  misc_feature 1..45: note = Synthetic sequence or unknown origin
  source 1..45: mol_type = other RNA
gaaaacattaggttgctctcgtcctttaacgggagcatttttttg

SEQ ID NO: 2567 - RNA, 103 nt, synthetic construct
  misc_feature 1..103: note = Synthetic sequence or unknown origin
  source 1..103: mol_type = other RNA
gttgtgatttgctttcgaaagaagcaaatcacaataaggattattccgttgtgaaaacattgggttgctctcgtcctttaacgggagcatttctttgtttttt

SEQ ID NO: 2568 - RNA, 51 nt, synthetic construct
  misc_feature 1..51: note = Synthetic sequence or unknown origin
  source 1..51: mol_type = other RNA
gaaaacattgggttgctctcgtcctttaacgggagcatttctttgtttttt

SEQ ID NO: 2569 - RNA, 50 nt, synthetic construct
  misc_feature 1..50: note = Synthetic sequence or unknown origin
  source 1..50: mol_type = other RNA
gaaaacattgggttgctctcgtcctttaacgggagcatttctttgttttt

SEQ ID NO: 2570 - RNA, 45 nt, synthetic construct
  misc_feature 1..45: note = Synthetic sequence or unknown origin
  source 1..45: mol_type = other RNA
gaaaacattgggttgctctcgtcctttaacgggagcatttctttg

SEQ ID NO: 2571 - RNA, 117 nt, synthetic construct
  misc_feature 1..117: note = Synthetic sequence or unknown origin
  source 1..117: mol_type = other RNA
gttgtgatttgctttcgaaagaagcaaatcacaataaggattattccgttgtgaaaacattaggttgctctcgtcctttaacgggagcatttttttgttttatgggattagtttttt

SEQ ID NO: 2572 - RNA, 82 nt, synthetic construct
  misc_feature 1..82: note = Synthetic sequence or unknown origin
  source 1..82: mol_type = other RNA
aaggattattccgttgtgaaaacattaggttgctctcgtcctttaacgggagcatttttttgttttatgggattagtttttt

SEQ ID NO: 2573 - RNA, 81 nt, synthetic construct
  misc_feature 1..81: note = Synthetic sequence or unknown origin
  source 1..81: mol_type = other RNA
aaggattattccgttgtgaaaacattaggttgctctcgtcctttaacgggagcatttttttgttttatgggattagttttt

SEQ ID NO: 2574 - RNA, 76 nt, synthetic construct
  misc_feature 1..76: note = Synthetic sequence or unknown origin
  source 1..76: mol_type = other RNA
aaggattattccgttgtgaaaacattaggttgctctcgtcctttaacgggagcatttttttgttttatgggattag

SEQ ID NO: 2575 - DNA, 5287 bp, synthetic construct
  misc_feature 1..5287: note = Synthetic sequence or unknown origin
  source 1..5287: mol_type = other DNA
taatacgactcactatagggagaccacaacggtttccctctagagagacaataaccctgataatgcttcaataatattgaaaaaggaagagtatgcctaagaagaagagaaaggtgggtaccgagaagcggatcttcggcttcgacatcggaattgccagcctcggatgggccgtcgtggatttcgatgatgccgccgatcctgagaacaacatctaccccaccggcaagatcgtgaagtccggcgtcagatgcttccccgtggccgagaatcctaaggatggatcttctctggcccagcctagacggcagaagagactgctgagaaggctgtgcagacggaaggccagaagaatggccggcatcaagaacctgttcgtgaccaacggcctcgtgggcaaagacgccctgttcaacgagaagtccaatatctacaaggcccgcgagaacaccgacgtgtggaatctgagagtgaaggccctgacagagaagctgaccaccatcgagttcatccgggtgctgacacacctggccaagcacagaggcttcaagagctatagaatcgccgccgagaaggccgatgccgagtctggaaaagtgctggaagccgtgaaggccaacagagccctgctggaaaatggcaagacactggcccagatcatcgtggaaaaaggcggccagaagcggaactggaaggataagaaaggcgacgccacctacgccaacagcatccccagagatgagatcgagagagagacacggctgatcttcgagagacagagagcctttggactggccgctgccaatgagaagctgcagagagatttcgagcggatcgccttccggtttagacctattgccggcgtggacaagatgatcggcaagtgccagttcgagcccgacgagcccagagcacctaaaaatgcccctagcgccgagttcttcgtggcctggaccaagatcaacaactgccgcgtgaaggacgaggacggcagatccagatttctgacccaagaggaaaaagagacagtctttaacctgctgaaggaccagaaagagatcaagtacagcgccctgagaaaggccctgttcgccaagaggcctgacatcaagtttgccgacgtcgagtacaaccccaagcctgtgtacgacaagaaaaccggcgagatcaaagagcctcctgctccagagaacctgaagttcttcagcctgaaaggctggaacgagctgaagcgcgtgatcgacgtgtccgcctatcctgtggaaaccctggataagatcgccaccgtgatcgccacacagaagaacgacgccgatatcagcggcgagctgaaacagctgggcctgcctgatagcgacatcgagagactgcagggactgcagttcaaagagttcatcagactgtccctgaaagccctgtacaagatcctgcctgagatgatgagcggcaagaagtacaacgaagcctgcgacgccgtgggctacgatttcaagagcacaggcgagagctttgctgcccagaagggcaagttcctgcctcctattcctgagagcctggccaccaccgtgcctaccgtgaatagagccatcagccagttccggaaggtgtacaatgccctggccagagagtacggcacccctgaccagatcaatgtggaactggcccgggacgtgtacaacgaccacgacgagagaaagaagatcgaggcccggcagaaagagtacgccgaagagaaagagaaggccaaggctctggctcagagcaagaccggcatcgaggatatcggaggccgggatctgctgaagttcagactgtatgagcagcaggacgggaagtgcgtgtactctggcgaagcactggatctgaggcggctgaccgagcaggactactgtgacgtggaccacatcatcccttacagcagaagcctggacaacagccagagcaacaaggtgctgtgcctgagcagagagaaccggcagaagtctaacaagacccctctcgagtacatcaacgaccccgtgaagcaggccgagtttattgccagagtgaagtccatgaagggcctgaacaaggccaagaaggacaggctgctgacccggggctttgatgagagagaggtggaatttcgggaccgcaacatcaatgacacccggtacatggccagatacgtgatgaagtacctggacgactgcatcgacttctcccagtccaaggccgccatcaaggacagagtgcagtctagaaatggcgccctgaccgacttcctgagacaccagtggggcctgagaaaagacagagccgagaacgacagacatcacgcccaggatgccatcgtgattgcctgtgccaccaacggctatacccagtacctggcctgtctgagcaagatctttgagaacaagcaggcctatgccaacaaatacggcgagccttggtacaaggccttcaagcagagagtgaaacagccctgggacggcttctatcaggatgtgcaggcatctctggccgaggtgttcgtgtccagacctcctagaaagaatgccaccggcgaggtgcaccaagagacaatcagaacactgaaccccgacaagccccagtacagcgagaaggatgtgaaaagcggcgtgaagatcagaggcggcctggccaacaatggcaacatgctgagagtggacgtgttcagccggaagaacgccaagggcaaagaacagttctacctggtgcctatctatctggccgacggcatcaaccccgagctgcctaacaaagccatcgtggctaacaagcccgagagcgagtggatcatcatggacgagacatacgccttcaagttcagcctctacaaggacgacctggtcaaggccaaagggaaagagctgtacttcggctacttcgacggctgcgatagatccaccggctgctttcacattgaggcccaggacagcagccagtattggaaaggcctgggcgccagaaacctcgagtatattaagaaataccaggtggaccctctggggcgctacgtggaagtgaagtctgagacaaggctgcccctgaacatcaagaagggaaaccccggatcctacccatacgatgttccagattacgcggccgctccaaaaaagaaaagaaaagttgcggctagccatcatcaccatcaccatcatcattaaggctgctaacaaagcccgaaaggaagctgagttggctgctgccaccgctgagcaataactagcataaccccttggggcctctaaacgggtcttgaggggttttttgctgaaaggaggaactatatccggatatccacaggacgggtgtggtcgccatgatcgcgtagtcgatagtggctccaagtagcgaagcgagcaggactgggcggcggccaaagcggtcggacagtgctccgagaacgggtgcgcatagaaattgcatcaacgcatatagcgctagcagcacgccatagtgactggcgatgctgtcggaatggacgatatcccgcaagaggcccggcagtaccggcataaccaagcctatgcctacagcatccagggtgacggtgccgaggatgacgatgagcgcattgttagatttcatacacggtgcctgactgcgttagcaatttaactgtgataaactaccgcattaaagcttatcgatgataagctgtcaaacatgagaattcttagaaaaactcatcgagcatcaaatgaaactgcaatttattcatatcaggattatcaataccatatttttgaaaaagccgtttctgtaatgaaggagaaaactcaccgaggcagttccataggatggcaagatcctggtatcggtctgcgattccgactcgtccaacatcaatacaacctattaatttcccctcgtcaaaaataaggttatcaagtgagaaatcaccatgagtgacgactgaatccggtgagaatggcaaaagcttatgcatttctttccagacttgttcaacaggccagccattacgctcgtcatcaaaatcactcgcatcaaccaaaccgttattcattcgtgattgcgcctgagcgagacgaaatacgcgatcgctgttaaaaggacaattacaaacaggaatcgaatgcaaccggcgcaggaacactgccagcgcatcaacaatattttcacctgaatcaggatattcttctaatacctggaatgctgttttcccggggatcgcagtggtgagtaaccatgcatcatcaggagtacggataaaatgcttgatggtcggaagaggcataaattccgtcagccagtttagtctgaccatctcatctgtaacatcattggcaacgctacctttgccatgtttcagaaacaactctggcgcatcgggcttcccatacaatcgatagattgtcgcacctgattgcccgacattatcgcgagcccatttatacccatataaatcagcatccatgttggaatttaatcgcggcctcgagcaagacgtttcccgttgaatatggctcataacaccccttgtattactgtttatgtaagcagacagttttattgttcatgaccaaaatcccttaacgtgagttttcgttccactgagcgtcagaccccgtagaaaagatcaaaggatcttcttgagatcctttttttctgcgcgtaatctgctgcttgcaaacaaaaaaaccaccgctaccagcggtggtttgtttgccggatcaagagctaccaactctttttccgaaggtaactggcttcagcagagcgcagataccaaatactgtccttctagtgtagccgtagttaggccaccacttcaagaactctgtagcaccgcctacatacctcgctctgctaatcctgttaccagtggctgctgccagtggcgataagtcgtgtcttaccgggttggactcaagacgatagttaccggataaggcgcagcggtcgggctgaacggggggttcgtgcacacagcccagcttggagcgaacgacctacaccgaactgagatacctacagcgtgagctatgagaaagcgccacgcttcccgaagggagaaaggcggacaggtatccggtaagcggcagggtcggaacaggagagcgcacgagggagcttccagggggaaacgcctggtatctttatagtcctgtcgggtttcgccacctctgacttgagcgtcgatttttgtgatgctcgtcaggggggcggagcctatggaaaaacgccagcaacgcggcctttttacggttcctggccttttgctggccttttgctcacatgttcgatcccgcgaaat

SEQ ID NO: 2576 - DNA, 2780 bp, synthetic construct
  misc_feature 1..2780: note = Synthetic sequence or unknown origin
  source 1..2780: mol_type = other DNA
tacacggtgcctgactgcgttagcaatttaactgtgataaactaccgcattaaagcttatcgatgataagctgtcaacacatttccccgaaaagtgccacctgacgtcctcgagtcccgcataatcgaaatgagggcctatttcccatgattccttcatatttgcatatacgatacaaggctgttagagagataattagaattaatttgactgtaaacacaaagatattagtacaaaatacgtgacgtagaaagtaataatttcttgggtagtttgcagttttaaaattatgttttaaaatggactatcatatgcttaccgtaacttgaaagtatttcgatttcttggctttatatatcttgctaatacgactcactataggaagagcagagccttggtctcgttgtgacttgcactcgaaagtgtgcttgccataacaagcgcaagtcgcgcaggcactgccccggcgggcatcacccgatgcccgccggggtatctccttttttgaattctctagcataaccccttggggcctctaaacgggtcttgaggggttttttgacctaggctaggggatatattccgggtaccccgcttcctcgctcactgactcgctacgctcggtcgttcgactgcggcgagcggaaatggcttacgaacggggcggagatttcctggaagatgccaggaagatacttaacagggaagtgagagggccgcggcaaagccgtttttccataggctccgcccccctgacaagcatcacgaaatctgacgctcaaatcagtggtggcgaaacccgacaggactataaagataccaggcgtttccccctggcggctccctcgtgcgctctcctgttcctgcctttcggtttaccggtgtcattccgctgttatggccgcgtttgtctcattccacgcctgacactcagttccgggtaggcagttcgctccaagctggactgtatgcacgaaccccccgttcagtccgaccgctgcgccttatccggtaactatcgtcttgagtccaacccggaaagacatgcaaaagcaccactggcagcagccactggtaattgatttagaggagttagtcttgaagtcatgcgccggttaaggctaaactgaaaggacaagttttggtgactgcgctcctccaagccagttacctcggttcaaagagttggtagctcagagaaccttcgaaaaaccgccctgcaaggcggttttttcgttttcagagcaagagattacgcgcagaccaaaacgatctcaagaagatcatcttattaatcagataaaatatttctagatttcagtgcaatttatctcttcaaatgtagcacctgaagtcagccccatacgatataagttgttactagtgcttggattctcaccaataaaaaacgcccggcggcaaccgagcgttctgaacaaatccagatggagttctgaggtcattactggatctatcaacaggagtccaagcgagaagggttggtttgcgcattcacagttctccgcaagaattgattggctccaattcttggagtggtgaatccgttagcgaggtgccgccggcttccattcaggtcgaggtggcccggctccatgcaccgcgacgcaacgcggggaggcagacaaggtatagggcggcgcctacaatccatgccaacccgttccatgtgctcgccgaggcggcataaatcgccgtgacgatcagcggtccaatgatcgaagttaggctggtaagagccgcgagcgatccttgaagctgtccctgatggtcgtcatctacctgcctggacagcatggcctgcaacgcgggcatcccgatgccgccggaagcgagaagaatcataatggggaaggccatccagcctcgcgtcgcgaacgccagcaagacgtagcccagcgcgtcggccgccatgccggcgataatggcctgcttctcgccgaaacgtttggtggcgggaccagtgacgaaggcttgagcgagggcgtgcaagattccgaataccgcaagcgacaggccgatcatcgtcgcgctccagcgaaagcggtcctcgccgaaaatgacccagagcgctgccggcacctgtcctacgagttgcatgataaagaagacagtcataagtgcggcgacgatagtcatgccccgcgcccaccggaaggagctgactgggttgaaggctctcaagggcatcggtcgacgctctcccttatgcgactcctgcattaggaagcagcccagtagtaggttgaggccgttgagcaccgccgccgcaaggaatggtgcatgcaaggagatggcgcccaacagtcccccggccacggggcctgccaccatacccacgccgaaacaagcgctcatgagcccgaagtggcgagcccgatcttccccatcggtgatgtcggcgatataggcgccagcaaccgcacctgtggcgccggtgatgccggccacgatgcgtccggcgtagaggatccacaggacgggtgtggtcgccatgatcgcgtagtcgatagtggctccaagtagcgaagcgagcaggactgggcggcggccaaagcggtcggacagtgctccgagaacgggtgcgcatagaaattgcatcaacgcatatagcgctagcagcacgccatagtgactggcgatgctgtcggaatggacgatatcccgcaagaggcccggcagtaccggcataaccaagcctatgcctacagcatccagggtgacggtgccgaggatgacgatgagcgcattgttagatttca

SEQ ID NO: 2577 - DNA, 5009 bp, synthetic construct
  misc_feature 1..5009: note = Synthetic sequence or unknown origin
  misc_feature 3040..3047: note = n is a, c, g, or t
  source 1..5009: mol_type = other DNA
tcgagtctttacactttatgcttccggctcgtatgttgtgtggaattgtgagcggataacaatttcacacatgattacggattcaacgtcgtgactggtaaaacccgggcgttacccaacttaatcgccttgcagcacatccccctttcgccagcaggcgtaataaggaaaggattcatgtactatttgaaaaacacaaacttttggatgttcggtttattctttttcttttacttttttatcatgggagcctacttcccgtttttcccgatttggctacatgatatcaaccatatcagcaaaagtgatacgggtattatttttgccgctatttctctgttctcgctattattccaaccgctgtttggtctgctttctgacaaactcggtctacgcaaatacctgctgtggattattaccggcatgttagtgatgtttgcgccgttctttatttttatcttcgggccactgctgcagtacaacattttagtagggtcgattgttggtggtatttatctaggctttagttttaacgccggtgcgccagcagtagaggcatttattgagaaagtcagccggcgcagtaatttcgaatttggtcgcgcgcggatgtttggcagtgttggctgggcgctggttgcctcgattgtcgggatcatgttcaccattaataatcagtttgttttctggctgggctctggcagttgtctcatcctcgccgttttactctttttcgccaaaacggacgcgccctcaagtgccacggttgccaatgcggtaggtgccaaccattcggcatttagccttaagctggcactggaactgttcagacagccaaaactgtggtttttgtcactgtatgttattggcgtttcctccacctacgatgtttttgaccaacagtttgctaatttctttacttcgttctttgctaccggtgaacagggtacccgcgtatttggctacgtaacgacaatgggcgaattacttaacgcctcgattatgttctttgcgccactgatcattaatcgcatcggtgggaagaatgccctgctgctggctggcactattatgtctgtacgtattattggctcatcgttcgccacctcagcgctggaagtggttattctgaaaacgctgcatatgtttgaagtaccgttcctgctggtgggctcctttaaatatattactagtcagtttgaagtgcgtttttcagcgacgatttatctggtcagtttcagcttctttaagcaactggcgatgatttttatgtctgtactggcgggcaatatgtatgaaagcataggtttccaaggcgcttatctggtgctgggtctggtggcgctgggcttcaccttaatttccgtgttcacgcttagcggcccgggcccgctttccctgctgcgtcgtcaggtgaatgaagtcgcttaaaggcctcgatgcagctagcatgctaatctgattcgttaccaattatgacaacttgacggctacatcattcactttttcttcacaaccggcacggaactcgctcgggctggccccggtgcattttttaaatacccgcgagaaatagagttgatcgtcaaaaccaacattgcgaccgacggtggcgataggcatccgggtggtgctcaaaagcagcttcgcctggctgatacgttggtcctcgcgccagcttaagacgctaatccctaactgctggcggaaaagatgtgacagacgcgacggcgacaagcaaacatgctgtgcgacgctggcgatatcaaaattgctgtctgccaggtgatcgctgatgtactgacaagcctcgcgtacccgattatccatcggtggatggagcgactcgttaatcgcttccatgcgccgcagtaacaattgctcaagcagatttatcgccagcagctccgaatagcgcccttccccttgcccggcgttaatgatttgcccaaacaggtcgctgaaatgcggctggtgcgcttcatccgggcgaaagaaccccgtattggcaaatattgacggccagttaagccattcatgccagtaggcgcgcggacgaaagtaaacccactggtgataccattcgcgagcctccggatgacgaccgtagtgatgaatctctcctggcgggaacagcaaaatatcacccggtcggcaaacaaattctcgtccctgatttttcaccaccccctgaccgcgaatggtgagattgagaatataacctttcattcccagcggtcggtcgataaaaaaatcgagataaccgttggcctcaatcggcgttaaacccgccaccagatgggcattaaacgagtatcccggcagcaggggatcattttgcgcttcagccatacttttcatactcccgccattcagagaagaaaccaattgtccatattgcatcagacattgccgtcactgcgtcttttactggctcttctcgctaaccaaaccggtaaccccgcttattaaaagcattctgtaacaaagcgggaccaaagccatgacaaaaacgcgtaacaaaagtgtctataatcacggcagaaaagtccacattgattatttgcacggcgtcacactttgctatgccatagcatttttatccataagattagcggatcctacctgacgctttttatcgcaactctctactgtttctccatacccgtttttttggggtagcgattgaaaacgatgcagtttaaggtttacacctataaaagagagagccgttatcgtctgtttgtggatgtacagagtgatattattgacacgcccgggcgacggatggtgatccccctggccagtgcacgtctgctgtcagataaagtctcccgtgaactttacccggtggtgcatatcggggatgaaagctggcgcatgatgaccaccgatatggccagtgtgccggtctccgttatcggggaagaagtggctgatctcagccaccgcgaaaatgacatcaaaaacgccattaacctgatgttttggggaatataatcttctagacatacaatggaagagcagagccttggtctcnnnnnnnnaagcttgatatcgaattcctgcagcccgggggatcccatggtacgcgtgctagaggcatcaaataaaacgaaaggctcagtcgaaagactgggcctttcgttttatctgttgtttgtcggtgaacgctctcctgagtaggacaaatccgccgccctagacctaggcgttcggctgcggcgagcggtatcagctcactcaaaggcggtaatacggttatccacagaatcaggggataacgcaggaaagaacatgtgagcaaaaggccagcaaaaggccaggaaccgtaaaaaggccgcgttgctggcgtttttccataggctccgcccccctgacgagcatcacaaaaatcgacgctcaagtcagaggtggcgaaacccgacaggactataaagataccaggcgtttccccctggaagctccctcgtgcgctctcctgttccgaccctgccgcttaccggatacctgtccgcctttctcccttcgggaagcgtggcgctttctcaatgctcacgctgtaggtatctcagttcggtgtaggtcgttcgctccaagctgggctgtgtgcacgaaccccccgttcagcccgaccgctgcgccttatccggtaactatcgtcttgagtccaacccggtaagacacgacttatcgccactggcagcagccactggtaacaggattagcagagcgaggtatgtaggcggtgctacagagttcttgaagtggtggcctaactacggctacactagaaggacagtatttggtatctgcgctctgctgaagccagttaccttcggaaaaagagttggtagctcttgatccggcaaacaaaccaccgctggtagcggtggtttttttgtttgcaagcagcagattacgcgcagaaaaaaaggatctcaagaagatcctttgatcttttctacggggtctgacgctcagtggaacgaaaactcacgttaagggattttggtcatgactagtgcttggattctcaccaataaaaaacgcccggcggcaaccgagcgttctgaacaaatccagatggagttctgaggtcattactggatctatcaacaggagtccaagcgagctcgatatcaaattacgccccgccctgccactcatcgcagtactgttgtaattcattaagcattctgccgacatggaagccatcacagacggcatgatgaacctgaatcgccagcggcatcagcaccttgtcgccttgcgtataatatttgcccatggtgaaaacgggggcgaagaagttgtccatattggccacgtttaaatcaaaactggtgaaactcacccagggattggctgagacgaaaaacatattctcaataaaccctttagggaaataggccaggttttcaccgtaacacgccacatcttgcgaatatatgtgtagaaactgccggaaatcgtcgtggtattcactccagagcgatgaaaacgtttcagtttgctcatggaaaacggtgtaacaagggtgaacactatcccatatcaccagctcaccgtctttcattgccatacggaattccggatgagcattcatcaggcgggcaagaatgtgaataaaggccggataaaacttgtgcttatttttctttacggtctttaaaaaggccgtaatatccagctgaacggtctggttataggtacattgagcaactgactgaaatgcctcaaaatgttctttacgatgccattgggatatatcaacggtggtatatccagtgatttttttctccattttagcttccttagctcctgaaaatctcgataactcaaaaaatacgcccggtagtgatcttatttcattatggtgaaagttggaacctcttacgtgccgatcaacgtctcattttcgccagatatcgacgtctaagaaaccattattatcatgacattaacctataaaaataggcgtatcacgaggccctttcgtcttcacc

SEQ ID NO: 2578 - DNA, 9200 bp, synthetic construct
  misc_feature 1..9200: note = Synthetic sequence or unknown origin
  source 1..9200: mol_type = other DNA
gacggatcgggagatctcccgatcccctatggtgcactctcagtacaatctgctctgatgccgcatagttaagccagtatctgctccctgcttgtgtgttggaggtcgctgagtagtgcgcgagcaaaatttaagctacaacaaggcaaggcttgaccgacaattgcatgaagaatctgcttagggttaggcgttttgcgctgcttcgcgatgtacgggccagatatacgcgttgacattgattattgactagttattaatagtaatcaattacggggtcattagttcatagcccatatatggagttccgcgttacataacttacggtaaatggcccgcctggctgaccgcccaacgacccccgcccattgacgtcaataatgacgtatgttcccatagtaacgccaatagggactttccattgacgtcaatgggtggagtatttacggtaaactgcccacttggcagtacatcaagtgtatcatatgccaagtacgccccctattgacgtcaatgacggtaaatggcccgcctggcattatgcccagtacatgaccttatgggactttcctacttggcagtacatctacgtattagtcatcgctattaccatggtgatgcggttttggcagtacatcaatgggcgtggatagcggtttgactcacggggatttccaagtctccaccccattgacgtcaatgggagtttgttttggcaccaaaatcaacgggactttccaaaatgtcgtaacaactccgccccattgacgcaaatgggcggtaggcgtgtacggtgggaggtctatataagcagagctctctggctaactagagaacccactgcttactggcttatcgaaattaatacgactcactatagggagacccaagctggctagcgtttaaacttaagcttgccaccatgcctaagaagaagagaaaggtgggtaccgagaagcggatcttcggcttcgacatcggaattgccagcctcggatgggccgtcgtggatttcgatgatgccgccgatcctgagaacaacatctaccccaccggcaagatcgtgaagtccggcgtcagatgcttccccgtggccgagaatcctaaggatggatcttctctggcccagcctagacggcagaagagactgctgagaaggctgtgcagacggaaggccagaagaatggccggcatcaagaacctgttcgtgaccaacggcctcgtgggcaaagacgccctgttcaacgagaagtccaatatctacaaggcccgcgagaacaccgacgtgtggaatctgagagtgaaggccctgacagagaagctgaccaccatcgagttcatccgggtgctgacacacctggccaagcacagaggcttcaagagctatagaatcgccgccgagaaggccgatgccgagtctggaaaagtgctggaagccgtgaaggccaacagagccctgctggaaaatggcaagacactggcccagatcatcgtggaaaaaggcggccagaagcggaactggaaggataagaaaggcgacgccacctacgccaacagcatccccagagatgagatcgagagagagacacggctgatcttcgagagacagagagcctttggactggccgctgccaatgagaagctgcagagagatttcgagcggatcgccttccggtttagacctattgccggcgtggacaagatgatcggcaagtgccagttcgagcccgacgagcccagagcacctaaaaatgcccctagcgccgagttcttcgtggcctggaccaagatcaacaactgccgcgtgaaggacgaggacggcagatccagatttctgacccaagaggaaaaagagacagtctttaacctgctgaaggaccagaaagagatcaagtacagcgccctgagaaaggccctgttcgccaagaggcctgacatcaagtttgccgacgtcgagtacaaccccaagcctgtgtacgacaagaaaaccggcgagatcaaagagcctcctgctccagagaacctgaagttcttcagcctgaaaggctggaacgagctgaagcgcgtgatcgacgtgtccgcctatcctgtggaaaccctggataagatcgccaccgtgatcgccacacagaagaacgacgccgatatcagcggcgagctgaaacagctgggcctgcctgatagcgacatcgagagactgcagggactgcagttcaaagagttcatcagactgtccctgaaagccctgtacaagatcctgcctgagatgatgagcggcaagaagtacaacgaagcctgcgacgccgtgggctacgatttcaagagcacaggcgagagctttgctgcccagaagggcaagttcctgcctcctattcctgagagcctggccaccaccgtgcctaccgtgaatagagccatcagccagttccggaaggtgtacaatgccctggccagagagtacggcacccctgaccagatcaatgtggaactggcccgggacgtgtacaacgaccacgacgagagaaagaagatcgaggcccggcagaaagagtacgccgaagagaaagagaaggccaaggctctggctcagagcaagaccggcatcgaggatatcggaggccgggatctgctgaagttcagactgtatgagcagcaggacgggaagtgcgtgtactctggcgaagcactggatctgaggcggctgaccgagcaggactactgtgacgtggaccacatcatcccttacagcagaagcctggacaacagccagagcaacaaggtgctgtgcctgagcagagagaaccggcagaagtctaacaagacccctctcgagtacatcaacgaccccgtgaagcaggccgagtttattgccagagtgaagtccatgaagggcctgaacaaggccaagaaggacaggctgctgacccggggctttgatgagagagaggtggaatttcgggaccgcaacatcaatgacacccggtacatggccagatacgtgatgaagtacctggacgactgcatcgacttctcccagtccaaggccgccatcaaggacagagtgcagtctagaaatggcgccctgaccgacttcctgagacaccagtggggcctgagaaaagacagagccgagaacgacagacatcacgcccaggatgccatcgtgattgcctgtgccaccaacggctatacccagtacctggcctgtctgagcaagatctttgagaacaagcaggcctatgccaacaaatacggcgagccttggtacaaggccttcaagcagagagtgaaacagccctgggacggcttctatcaggatgtgcaggcatctctggccgaggtgttcgtgtccagacctcctagaaagaatgccaccggcgaggtgcaccaagagacaatcagaacactgaaccccgacaagccccagtacagcgagaaggatgtgaaaagcggcgtgaagatcagaggcggcctggccaacaatggcaacatgctgagagtggacgtgttcagccggaagaacgccaagggcaaagaacagttctacctggtgcctatctatctggccgacggcatcaaccccgagctgcctaacaaagccatcgtggctaacaagcccgagagcgagtggatcatcatggacgagacatacgccttcaagttcagcctctacaaggacgacctggtcaaggccaaagggaaagagctgtacttcggctacttcgacggctgcgatagatccaccggctgctttcacattgaggcccaggacagcagccagtattggaaaggcctgggcgccagaaacctcgagtatattaagaaataccaggtggaccctctggggcgctacgtggaagtgaagtctgagacaaggctgcccctgaacatcaagaagggaaaccccggatcctacccatacgatgttccagattacgcggccgctccaaaaaagaaaagaaaagttgaattcggcggcagcggcgccaccaacttcagcctgctgaagcaggccggcgacgtggaggagaaccccggccccatggtgagcaagggcgaggaggataacatggccatcatcaaggagttcatgcgcttcaaggtgcacatggagggctccgtgaacggccacgagttcgagatcgagggcgagggcgagggccgcccctacgagggcacccagaccgccaagctgaaggtgaccaagggtggccccctgcccttcgcctgggacatcctgtcccctcagttcatgtacggctccaaggcctacgtgaagcaccccgccgacatccccgactacttgaagctgtccttccccgagggcttcaagtgggagcgcgtgatgaacttcgaggacggcggcgtggtgaccgtgacccaggactcctccctgcaggacggcgagttcatctacaaggtgaagctgcgcggcaccaacttcccctccgacggccccgtaatgcagaagaagaccatgggctgggaggcctcctccgagcggatgtaccccgaggacggcgccctgaagggcgagatcaagcagaggctgaagctgaaggacggcggccactacgacgctgaggtcaagaccacctacaaggccaagaagcccgtgcagctgcccggcgcctacaacgtcaacatcaagttggacatcacctcccacaacgaggactacaccatcgtggaacagtacgaacgcgccgagggccgccactccaccggcggcatggacgagctgtacaagtagctcgagtctagagggcccgtttaaacccgctgatcagcctcgactgtgccttctagttgccagccatctgttgtttgcccctcccccgtgccttccttgaccctggaaggtgccactcccactgtcctttcctaataaaatgaggaaattgcatcgcattgtctgagtaggtgtcattctattctggggggtggggtggggcaggacagcaagggggaggattgggaagacaatagcaggcatgctggggatgcggtgggctctatggcttctgaggcggaaagaaccagctggggctctagggggtatccccacgcgccctgtagcggcgcattaagcgcggcgggtgtggtggttacgcgcagcgtgaccgctacacttgccagcgccctagcgcccgctcctttcgctttcttcccttcctttctcgccacgttcgccggctttccccgtcaagctctaaatcgggggctccctttagggttccgatttagtgctttacggcacctcgaccccaaaaaacttgattagggtgatggttcacgtagtgggccatcgccctgatagacggtttttcgccctttgacgttggagtccacgttctttaatagtggactcttgttccaaactggaacaacactcaaccctatctcggtctattcttttgatttataagggattttgccgatttcggcctattggttaaaaaatgagctgatttaacaaaaatttaacgcgaattaattctgtggaatgtgtgtcagttagggtgtggaaagtccccaggctccccagcaggcagaagtatgcaaagcatgcatctcaattagtcagcaaccaggtgtggaaagtccccaggctccccagcaggcagaagtatgcaaagcatgcatctcaattagtcagcaaccatagtcccgcccctaactccgcccatcccgcccctaactccgcccagttccgcccattctccgccccatggctgactaattttttttatttatgcagaggccgaggccgcctctgcctctgagctattccagaagtagtgaggaggcttttttggaggcctaggcttttgcaaaaagctcccgggagcttgtatatccattttcggatctgatcaagagacaggatgaggatcgtttcgcatgattgaacaagatggattgcacgcaggttctccggccgcttgggtggagaggctattcggctatgactgggcacaacagacaatcggctgctctgatgccgccgtgttccggctgtcagcgcaggggcgcccggttctttttgtcaagaccgacctgtccggtgccctgaatgaactgcaggacgaggcagcgcggctatcgtggctggccacgacgggcgttccttgcgcagctgtgctcgacgttgtcactgaagcgggaagggactggctgctattgggcgaagtgccggggcaggatctcctgtcatctcaccttgctcctgccgagaaagtatccatcatggctgatgcaatgcggcggctgcatacgcttgatccggctacctgcccattcgaccaccaagcgaaacatcgcatcgagcgagcacgtactcggatggaagccggtcttgtcgatcaggatgatctggacgaagagcatcaggggctcgcgccagccgaactgttcgccaggctcaaggcgcgcatgcccgacggcgaggatctcgtcgtgacccatggcgatgcctgcttgccgaatatcatggtggaaaatggccgcttttctggattcatcgactgtggccggctgggtgtggcggaccgctatcaggacatagcgttggctacccgtgatattgctgaagagcttggcggcgaatgggctgaccgcttcctcgtgctttacggtatcgccgctcccgattcgcagcgcatcgccttctatcgccttcttgacgagttcttctgagcgggactctggggttcgaaatgaccgaccaagcgacgcccaacctgccatcacgagatttcgattccaccgccgccttctatgaaaggttgggcttcggaatcgttttccgggacgccggctggatgatcctccagcgcggggatctcatgctggagttcttcgcccaccccaacttgtttattgcagcttataatggttacaaataaagcaatagcatcacaaatttcacaaataaagcatttttttcactgcattctagttgtggtttgtccaaactcatcaatgtatcttatcatgtctgtataccgtcgacctctagctagagcttggcgtaatcatggtcatagctgtttcctgtgtgaaattgttatccgctcacaattccacacaacatacgagccggaagcataaagtgtaaagcctggggtgcctaatgagtgagctaactcacattaattgcgttgcgctcactgcccgctttccagtcgggaaacctgtcgtgccagctgcattaatgaatcggccaacgcgcggggagaggcggtttgcgtattgggcgctcttccgcttcctcgctcactgactcgctgcgctcggtcgttcggctgcggcgagcggtatcagctcactcaaaggcggtaatacggttatccacagaatcaggggataacgcaggaaagaacatgtgagcaaaaggccagcaaaaggccaggaaccgtaaaaaggccgcgttgctggcgtttttccataggctccgcccccctgacgagcatcacaaaaatcgacgctcaagtcagaggtggcgaaacccgacaggactataaagataccaggcgtttccccctggaagctccctcgtgcgctctcctgttccgaccctgccgcttaccggatacctgtccgcctttctcccttcgggaagcgtggcgctttctcatagctcacgctgtaggtatctcagttcggtgtaggtcgttcgctccaagctgggctgtgtgcacgaaccccccgttcagcccgaccgctgcgccttatccggtaactatcgtcttgagtccaacccggtaagacacgacttatcgccactggcagcagccactggtaacaggattagcagagcgaggtatgtaggcggtgctacagagttcttgaagtggtggcctaactacggctacactagaagaacagtatttggtatctgcgctctgctgaagccagttaccttcggaaaaagagttggtagctcttgatccggcaaacaaaccaccgctggtagcggtggtttttttgtttgcaagcagcagattacgcgcagaaaaaaaggatctcaagaagatcctttgatcttttctacggggtctgacgctcagtggaacgaaaactcacgttaagggattttggtcatgagattatcaaaaaggatcttcacctagatccttttaaattaaaaatgaagttttaaatcaatctaaagtatatatgagtaaacttggtctgacagttaccaatgcttaatcagtgaggcacctatctcagcgatctgtctatttcgttcatccatagttgcctgactccccgtcgtgtagataactacgatacgggagggcttaccatctggccccagtgctgcaatgataccgcgagacccacgctcaccggctccagatttatcagcaataaaccagccagccggaagggccgagcgcagaagtggtcctgcaactttatccgcctccatccagtctattaattgttgccgggaagctagagtaagtagttcgccagttaatagtttgcgcaacgttgttgccattgctacaggcatcgtggtgtcacgctcgtcgtttggtatggcttcattcagctccggttcccaacgatcaaggcgagttacatgatcccccatgttgtgcaaaaaagcggttagctccttcggtcctccgatcgttgtcagaagtaagttggccgcagtgttatcactcatggttatggcagcactgcataattctcttactgtcatgccatccgtaagatgcttttctgtgactggtgagtactcaaccaagtcattctgagaatagtgtatgcggcgaccgagttgctcttgcccggcgtcaatacgggataataccgcgccacatagcagaactttaaaagtgctcatcattggaaaacgttcttcggggcgaaaactctcaaggatcttaccgctgttgagatccagttcgatgtaacccactcgtgcacccaactgatcttcagcatcttttactttcaccagcgtttctgggtgagcaaaaacaggaaggcaaaatgccgcaaaaaagggaataagggcgacacggaaatgttgaatactcatactcttcctttttcaatattattgaagcatttatcagggttattgtctcatgagcggatacatatttgaatgtatttagaaaaataaacaaataggggttccgcgcacatttccccgaaaagtgccacctgacgtc

SEQ ID NO: 2579 - protein, 9 aa, synthetic construct
  REGION 1..9: note = Synthetic sequence or unknown origin
YPYDVPDYA

SEQ ID NO: 2580 - protein, 7 aa, synthetic construct
  REGION 1..7: note = Synthetic sequence or unknown origin
PKKKRKV

SEQ ID NO: 2581 - protein, 19 aa, synthetic construct
  REGION 1..19: note = Synthetic sequence or unknown origin
ATNFSLLKQAGDVEENPGP

SEQ ID NO: 2582 - protein, 236 aa, synthetic construct
  REGION 1..236: note = Synthetic sequence or unknown origin
MVSKGEEDNMAIIKEFMRFKVHMEGSVNGHEFEIEGEGEGRPYEGTQTAKLKVTKGGPLPFAWDILSPQFMYGSKAYVKHPADIPDYLKLSFPEGFKWERVMNFEDGGVVTVTQDSSLQDGEFIYKVKLRGTNFPSDGPVMQKKTMGWEASSERMYPEDGALKGEIKQRLKLKDGGHYDAEVKTTYKAKKPVQLPGAYNVNIKLDITSHNEDYTIVEQYERAEGRHSTGGMDELYK

SEQ ID NO: 2583 - DNA, 27 bp, synthetic construct
  misc_feature 1..27: note = Synthetic sequence or unknown origin
  source 1..27: mol_type = other DNA
tacccatacgatgttccagattacgct

SEQ ID NO: 2584 - DNA, 21 bp, synthetic construct
  misc_feature 1..21: note = Synthetic sequence or unknown origin
  source 1..21: mol_type = other DNA
ccaaaaaagaaaagaaaagtt

SEQ ID NO: 2585 - DNA, 57 bp, synthetic construct
  misc_feature 1..57: note = Synthetic sequence or unknown origin
  source 1..57: mol_type = other DNA
gccaccaacttcagcctgctgaagcaggccggcgacgtggaggagaaccccggcccc

SEQ ID NO: 2586 - DNA, 711 bp, synthetic construct
  misc_feature 1..711: note = Synthetic sequence or unknown origin
  source 1..711: mol_type = other DNA
atggtgagcaagggcgaggaggataacatggccatcatcaaggagttcatgcgcttcaaggtgcacatggagggctccgtgaacggccacgagttcgagatcgagggcgagggcgagggccgcccctacgagggcacccagaccgccaagctgaaggtgaccaagggtggccccctgcccttcgcctgggacatcctgtcccctcagttcatgtacggctccaaggcctacgtgaagcaccccgccgacatccccgactacttgaagctgtccttccccgagggcttcaagtgggagcgcgtgatgaacttcgaggacggcggcgtggtgaccgtgacccaggactcctccctgcaggacggcgagttcatctacaaggtgaagctgcgcggcaccaacttcccctccgacggccccgtaatgcagaagaagaccatgggctgggaggcctcctccgagcggatgtaccccgaggacggcgccctgaagggcgagatcaagcagaggctgaagctgaaggacggcggccactacgacgctgaggtcaagaccacctacaaggccaagaagcccgtgcagctgcccggcgcctacaacgtcaacatcaagttggacatcacctcccacaacgaggactacaccatcgtggaacagtacgaacgcgccgagggccgccactccaccggcggcatggacgagctgtacaagtag

SEQ ID NO: 2587 - RNA, 22 nt, synthetic construct
  misc_feature 1..22: note = Synthetic sequence or unknown origin
  source 1..22: mol_type = other RNA
tgtcattgcgccgggccctgac

SEQ ID NO: 2588 - RNA, 22 nt, synthetic construct
  misc_feature 1..22: note = Synthetic sequence or unknown origin
  source 1..22: mol_type = other RNA
ccctgccgtgtaccagctgaga

SEQ ID NO: 2589 - RNA, 22 nt, synthetic construct
  misc_feature 1..22: note = Synthetic sequence or unknown origin
  source 1..22: mol_type = other RNA
gataaggccaaccatgatgtgc

SEQ ID NO: 2590 - RNA, 22 nt, synthetic construct
  misc_feature 1..22: note = Synthetic sequence or unknown origin
  source 1..22: mol_type = other RNA
aaaacagaacaccaaaaaaatc

SEQ ID NO: 2591 - RNA, 22 nt, synthetic construct
  misc_feature 1..22: note = Synthetic sequence or unknown origin
  source 1..22: mol_type = other RNA
ctgccgtgtgaaccatgtgact

SEQ ID NO: 2592 - RNA, 22 nt, synthetic construct
  misc_feature 1..22: note = Synthetic sequence or unknown origin
  source 1..22: mol_type = other RNA
ccacccgctcccagcccggact

SEQ ID NO: 2593 - RNA, 22 nt, synthetic construct
  misc_feature 1..22: note = Synthetic sequence or unknown origin
  source 1..22: mol_type = other RNA
cccctcggagtctacacccgct

SEQ ID NO: 2594 - RNA, 22 nt, synthetic construct
  misc_feature 1..22: note = Synthetic sequence or unknown origin
  source 1..22: mol_type = other RNA
tgttatggtcacagcgggtgta

SEQ ID NO: 2595 - RNA, 22 nt, synthetic construct
  misc_feature 1..22: note = Synthetic sequence or unknown origin
  source 1..22: mol_type = other RNA
gtgtcaagccccagaggccaca

SEQ ID NO: 2596 - RNA, 22 nt, synthetic construct
  misc_feature 1..22: note = Synthetic sequence or unknown origin
  source 1..22: mol_type = other RNA
tctagggaggtaacggtaaaag

SEQ ID NO: 2597 - RNA, 22 nt, synthetic construct
  misc_feature 1..22: note = Synthetic sequence or unknown origin
  source 1..22: mol_type = other RNA
atatcactttcttcatccagta

SEQ ID NO: 2598 - RNA, 22 nt, synthetic construct
  misc_feature 1..22: note = Synthetic sequence or unknown origin
  source 1..22: mol_type = other RNA
ttccagaagacaccttcttccc

SEQ ID NO: 2599 - RNA, 22 nt, synthetic construct
  misc_feature 1..22: note = Synthetic sequence or unknown origin
  source 1..22: mol_type = other RNA
gtaaggcagccaacaggcgaag

SEQ ID NO: 2600 - RNA, 22 nt, synthetic construct
  misc_feature 1..22: note = Synthetic sequence or unknown origin
  source 1..22: mol_type = other RNA
ctcagtttcttctggtaaccca

SEQ ID NO: 2601 - RNA, 22 nt, synthetic construct
  misc_feature 1..22: note = Synthetic sequence or unknown origin
  source 1..22: mol_type = other RNA
ttccaaggaacaaagagccttt

SEQ ID NO: 2602 - RNA, 22 nt, synthetic construct
  misc_feature 1..22: note = Synthetic sequence or unknown origin
  source 1..22: mol_type = other RNA
ttccagaagacaccttcttccc

SEQ ID NO: 2603 - RNA, 22 nt, synthetic construct
  misc_feature 1..22: note = Synthetic sequence or unknown origin
  source 1..22: mol_type = other RNA
ctcagctggtacacggcagggt

SEQ ID NO: 2604 - RNA, 22 nt, synthetic construct
  misc_feature 1..22: note = Synthetic sequence or unknown origin
  source 1..22: mol_type = other RNA
agaagacaccttcttccccagc

SEQ ID NO: 2605 - RNA, 22 nt, synthetic construct
  misc_feature 1..22: note = Synthetic sequence or unknown origin
  source 1..22: mol_type = other RNA
cacgaggatggcaagagaccca

SEQ ID NO: 2606 - RNA, 22 nt, synthetic construct
  misc_feature 1..22: note = Synthetic sequence or unknown origin
  source 1..22: mol_type = other RNA
catgagcgtggtcagggcccgg

SEQ ID NO: 2607 - RNA, 22 nt, synthetic construct
  misc_feature 1..22: note = Synthetic sequence or unknown origin
  source 1..22: mol_type = other RNA
gctgagagactctaaatccagt

SEQ ID NO: 2608 - RNA, 22 nt, synthetic construct
  misc_feature 1..22: note = Synthetic sequence or unknown origin
  source 1..22: mol_type = other RNA
ggcttcaagcaacttgtagtgg

SEQ ID NO: 2609 - RNA, 22 nt, synthetic construct
  misc_feature 1..22: note = Synthetic sequence or unknown origin
  source 1..22: mol_type = other RNA
aagagagcctgcgggcagagct

SEQ ID NO: 2610 - RNA, 22 nt, synthetic construct
  misc_feature 1..22: note = Synthetic sequence or unknown origin
  source 1..22: mol_type = other RNA
ttccgtgtcacacaactgccca

SEQ ID NO: 2611 - RNA, 22 nt, synthetic construct
  misc_feature 1..22: note = Synthetic sequence or unknown origin
  source 1..22: mol_type = other RNA
accaaagctgcccttacctggg

SEQ ID NO: 2612 - RNA, 22 nt, synthetic construct
  misc_feature 1..22: note = Synthetic sequence or unknown origin
  source 1..22: mol_type = other RNA
ctcagctggtacacggcagggt

SEQ ID NO: 2613 - RNA, 22 nt, synthetic construct
  misc_feature 1..22: note = Synthetic sequence or unknown origin
  source 1..22: mol_type = other RNA
aagaaagctagggcctcggtga

SEQ ID NO: 2614 - RNA, 22 nt, synthetic construct
  misc_feature 1..22: note = Synthetic sequence or unknown origin
  source 1..22: mol_type = other RNA
ggataaggccaaccatgatgtg

SEQ ID NO: 2615 - RNA, 22 nt, synthetic construct
  misc_feature 1..22: note = Synthetic sequence or unknown origin
  source 1..22: mol_type = other RNA
gtaccgcatgagccccagcaac

SEQ ID NO: 2616 - RNA, 22 nt, synthetic construct
  misc_feature 1..22: note = Synthetic sequence or unknown origin
  source 1..22: mol_type = other RNA
agcacgaagctctccgatgtgt

SEQ ID NO: 2617 - RNA, 22 nt, synthetic construct
  misc_feature 1..22: note = Synthetic sequence or unknown origin
  source 1..22: mol_type = other RNA
gaccctgccgtgtaccagctga

SEQ ID NO: 2618 - RNA, 22 nt, synthetic construct
  misc_feature 1..22: note = Synthetic sequence or unknown origin
  source 1..22: mol_type = other RNA
gccttcaacaacagcattattc

SEQ ID NO: 2619 - RNA, 22 nt, synthetic construct
  misc_feature 1..22: note = Synthetic sequence or unknown origin
  source 1..22: mol_type = other RNA
ggtgttatggtcacagcgggtg

SEQ ID NO: 2620 - RNA, 22 nt, synthetic construct
  misc_feature 1..22: note = Synthetic sequence or unknown origin
  source 1..22: mol_type = other RNA
cccctcggagtctacacccgct

SEQ ID NO: 2621 - RNA, 22 nt, synthetic construct
  misc_feature 1..22: note = Synthetic sequence or unknown origin
  source 1..22: mol_type = other RNA
cagtccgggctgggagcgggtg

SEQ ID NO: 2622 - RNA, 22 nt, synthetic construct
  misc_feature 1..22: note = Synthetic sequence or unknown origin
  source 1..22: mol_type = other RNA
cagctgcgggaatgggattccc

SEQ ID NO: 2623 - RNA, 22 nt, synthetic construct
  misc_feature 1..22: note = Synthetic sequence or unknown origin
  source 1..22: mol_type = other RNA
gtgtcaagccccagaggacaca

SEQ ID NO: 2624 - RNA, 22 nt, synthetic construct
  misc_feature 1..22: note = Synthetic sequence or unknown origin
  source 1..22: mol_type = other RNA
aaaatcaccttgctgatactgg

SEQ ID NO: 2625 - RNA, 22 nt, synthetic construct
  misc_feature 1..22: note = Synthetic sequence or unknown origin
  source 1..22: mol_type = other RNA
atcaccttgctgatactggatg

SEQ ID NO: 2626 - RNA, 22 nt, synthetic construct
  misc_feature 1..22: note = Synthetic sequence or unknown origin
  source 1..22: mol_type = other RNA
accctaagggaattatttcgcg

SEQ ID NO: 2627 - RNA, 22 nt, synthetic construct
  misc_feature 1..22: note = Synthetic sequence or unknown origin
  source 1..22: mol_type = other RNA
ggttctagggaggtaacggtaa

SEQ ID NO: 2628 - RNA, 22 nt, synthetic construct
  misc_feature 1..22: note = Synthetic sequence or unknown origin
  source 1..22: mol_type = other RNA
ctgaccatcgacgagaaaggga

SEQ ID NO: 2629 - RNA, 22 nt, synthetic construct
  misc_feature 1..22: note = Synthetic sequence or unknown origin
  source 1..22: mol_type = other RNA
gccttcaacaacagcattattc

SEQ ID NO: 2630 - RNA, 22 nt, synthetic construct
  misc_feature 1..22: note = Synthetic sequence or unknown origin
  source 1..22: mol_type = other RNA
gtaaggcagccaacaggcgaag

SEQ ID NO: 2631 - RNA, 22 nt, synthetic construct
  misc_feature 1..22: note = Synthetic sequence or unknown origin
  source 1..22: mol_type = other RNA
agaacaccaaaaaaatccaaaa

SEQ ID NO: 2632 - RNA, 22 nt, synthetic construct
  misc_feature 1..22: note = Synthetic sequence or unknown origin
  source 1..22: mol_type = other RNA
ttccaaggaacaaagagctttt

SEQ ID NO: 2633 - RNA, 22 nt, synthetic construct
  misc_feature 1..22: note = Synthetic sequence or unknown origin
  source 1..22: mol_type = other RNA
ggaagaaagctagggcctcggt

SEQ ID NO: 2634 - RNA, 22 nt, synthetic construct
  misc_feature 1..22: note = Synthetic sequence or unknown origin
  source 1..22: mol_type = other RNA
ctgtgtagatgacatggactgc

SEQ ID NO: 2635 - RNA, 22 nt, synthetic construct
  misc_feature 1..22: note = Synthetic sequence or unknown origin
  source 1..22: mol_type = other RNA
acggaaacagggttccttcatg

SEQ ID NO: 2636 - RNA, 22 nt, synthetic construct
  misc_feature 1..22: note = Synthetic sequence or unknown origin
  source 1..22: mol_type = other RNA
ctctcgccactggaaatccagc

SEQ ID NO: 2637 - RNA, 22 nt, synthetic construct
  misc_feature 1..22: note = Synthetic sequence or unknown origin
  source 1..22: mol_type = other RNA
cattccgctaggaaagacaatg

SEQ ID NO: 2638 - RNA, 22 nt, synthetic construct
  misc_feature 1..22: note = Synthetic sequence or unknown origin
  source 1..22: mol_type = other RNA
gccacagcactgttgctcttga

SEQ ID NO: 2639 - RNA, 22 nt, synthetic construct
  misc_feature 1..22: note = Synthetic sequence or unknown origin
  source 1..22: mol_type = other RNA
tttcatccatccgacattgaag

SEQ ID NO: 2640 - RNA, 22 nt, synthetic construct
  misc_feature 1..22: note = Synthetic sequence or unknown origin
  source 1..22: mol_type = other RNA
caaagtcacatggttcacacgg

SEQ ID NO: 2641 - RNA, 22 nt, synthetic construct
  misc_feature 1..22: note = Synthetic sequence or unknown origin
  source 1..22: mol_type = other RNA
tgcagcaacaggcaccgtggct

SEQ ID NO: 2642 - RNA, 22 nt, synthetic construct
  misc_feature 1..22: note = Synthetic sequence or unknown origin
  source 1..22: mol_type = other RNA
ccctcggagtctacacctgctg

SEQ ID NO: 2643 - RNA, 22 nt, synthetic construct
  misc_feature 1..22: note = Synthetic sequence or unknown origin
  source 1..22: mol_type = other RNA
catccagtatcagcaaggtgat

SEQ ID NO: 2644 - RNA, 22 nt, synthetic construct
  misc_feature 1..22: note = Synthetic sequence or unknown origin
  source 1..22: mol_type = other RNA
cattccgctaggaaagacaatg

SEQ ID NO: 2645 - RNA, 22 nt, synthetic construct
  misc_feature 1..22: note = Synthetic sequence or unknown origin
  source 1..22: mol_type = other RNA
cctttctcgtcgatggtcagca

SEQ ID NO: 2646 - RNA, 22 nt, synthetic construct
  misc_feature 1..22: note = Synthetic sequence or unknown origin
  source 1..22: mol_type = other RNA
cagctgtctgatgcctcctgtc

SEQ ID NO: 2647 - RNA, 22 nt, synthetic construct
  misc_feature 1..22: note = Synthetic sequence or unknown origin
  source 1..22: mol_type = other RNA
gtaaggcagccaacaggcgaag

SEQ ID NO: 2648 - RNA, 22 nt, synthetic construct
  misc_feature 1..22: note = Synthetic sequence or unknown origin
  source 1..22: mol_type = other RNA
taccagtttgccacggcatcaa

SEQ ID NO: 2649 - RNA, 22 nt, synthetic construct
  misc_feature 1..22: note = Synthetic sequence or unknown origin
  source 1..22: mol_type = other RNA
ttggccaccagtgttctgcaga

SEQ ID NO: 2650 - RNA, 22 nt, synthetic construct
  misc_feature 1..22: note = Synthetic sequence or unknown origin
  source 1..22: mol_type = other RNA
atccagaaccctgaccctgccg

SEQ ID NO: 2651 - RNA, 22 nt, synthetic construct
  misc_feature 1..22: note = Synthetic sequence or unknown origin
  source 1..22: mol_type = other RNA
agctgcgggaatgggattccca

SEQ ID NO: 2652 - RNA, 22 nt, synthetic construct
  misc_feature 1..22: note = Synthetic sequence or unknown origin
  source 1..22: mol_type = other RNA
ccacccgctcccagcccggact

SEQ ID NO: 2653 - RNA, 22 nt, synthetic construct
  misc_feature 1..22: note = Synthetic sequence or unknown origin
  source 1..22: mol_type = other RNA
cccctcggagtctacacccgct

SEQ ID NO: 2654 - RNA, 22 nt, synthetic construct
  misc_feature 1..22: note = Synthetic sequence or unknown origin
  source 1..22: mol_type = other RNA
gagtcccagctgcgggaatggg

SEQ ID NO: 2655 - RNA, 22 nt, synthetic construct
  misc_feature 1..22: note = Synthetic sequence or unknown origin
  source 1..22: mol_type = other RNA
cttcgtgtatctgtttccggac

SEQ ID NO: 2656 - RNA, 22 nt, synthetic construct
  misc_feature 1..22: note = Synthetic sequence or unknown origin
  source 1..22: mol_type = other RNA
atccagaaccctgaccctgccg

SEQ ID NO: 2657 - RNA, 22 nt, synthetic construct
  misc_feature 1..22: note = Synthetic sequence or unknown origin
  source 1..22: mol_type = other RNA
accctccaccatgagcccgggt

SEQ ID NO: 2658 - RNA, 22 nt, synthetic construct
  misc_feature 1..22: note = Synthetic sequence or unknown origin
  source 1..22: mol_type = other RNA
atccacttgtgcacagtgttct

SEQ ID NO: 2659 - RNA, 22 nt, synthetic construct
  misc_feature 1..22: note = Synthetic sequence or unknown origin
  source 1..22: mol_type = other RNA
agcgtcatgagcagattaaacc

SEQ ID NO: 2660 - RNA, 22 nt, synthetic construct
  misc_feature 1..22: note = Synthetic sequence or unknown origin
  source 1..22: mol_type = other RNA
ataaacacgaggatggcaagag

SEQ ID NO: 2661 - RNA, 22 nt, synthetic construct
  misc_feature 1..22: note = Synthetic sequence or unknown origin
  source 1..22: mol_type = other RNA
caagactgggcacaggagtggg

SEQ ID NO: 2662 - RNA, 22 nt, synthetic construct
  misc_feature 1..22: note = Synthetic sequence or unknown origin
  source 1..22: mol_type = other RNA
gaggaggattcggaacccaatc

SEQ ID NO: 2663 - RNA, 22 nt, synthetic construct
  misc_feature 1..22: note = Synthetic sequence or unknown origin
  source 1..22: mol_type = other RNA
ttcccttctgggcagttgatgc

SEQ ID NO: 2664 - RNA, 22 nt, synthetic construct
  misc_feature 1..22: note = Synthetic sequence or unknown origin
  source 1..22: mol_type = other RNA
aggatgaccaatccattgccca

SEQ ID NO: 2665 - RNA, 22 nt, synthetic construct
  misc_feature 1..22: note = Synthetic sequence or unknown origin
  source 1..22: mol_type = other RNA
tgctcgtggtgaccgaagggga

SEQ ID NO: 2666 - RNA, 22 nt, synthetic construct
  misc_feature 1..22: note = Synthetic sequence or unknown origin
  source 1..22: mol_type = other RNA
ttctccaacacatcggagagct

SEQ ID NO: 2667 - RNA, 22 nt, synthetic construct
  misc_feature 1..22: note = Synthetic sequence or unknown origin
  source 1..22: mol_type = other RNA
ctgtgatgtcaagctggtcgag

SEQ ID NO: 2668 - RNA, 22 nt, synthetic construct
  misc_feature 1..22: note = Synthetic sequence or unknown origin
  source 1..22: mol_type = other RNA
cagtccgggctgggagcgggtg

SEQ ID NO: 2669 - RNA, 22 nt, synthetic construct
  misc_feature 1..22: note = Synthetic sequence or unknown origin
  source 1..22: mol_type = other RNA
ggctgggtcctgggaatcccat

SEQ ID NO: 2670 - RNA, 22 nt, synthetic construct
  misc_feature 1..22: note = Synthetic sequence or unknown origin
  source 1..22: mol_type = other RNA
tgggtcctgggaatcccattcc

SEQ ID NO: 2671 - RNA, 22 nt, synthetic construct
  misc_feature 1..22: note = Synthetic sequence or unknown origin
  source 1..22: mol_type = other RNA
aatatcactttcttcatccagt

SEQ ID NO: 2672 - RNA, 22 nt, synthetic construct
  misc_feature 1..22: note = Synthetic sequence or unknown origin
  source 1..22: mol_type = other RNA
tgctcgtggtgaccgaagggga

SEQ ID NO: 2673 - RNA, 22 nt, synthetic construct
  misc_feature 1..22: note = Synthetic sequence or unknown origin
  source 1..22: mol_type = other RNA
gtgtcacaaagtaaggattctg

SEQ ID NO: 2674 - RNA, 22 nt, synthetic construct
  misc_feature 1..22: note = Synthetic sequence or unknown origin
  source 1..22: mol_type = other RNA
ggaagaaagctagggcctcggt

SEQ ID NO: 2675 - RNA, 22 nt, synthetic construct
  misc_feature 1..22: note = Synthetic sequence or unknown origin
  source 1..22: mol_type = other RNA
atccagaaccctgaccctgccg

SEQ ID NO: 2676 - RNA, 22 nt, synthetic construct
  misc_feature 1..22: note = Synthetic sequence or unknown origin
  source 1..22: mol_type = other RNA
acggaaacagggttccttcatg

SEQ ID NO: 2677 - RNA, 22 nt, synthetic construct
  misc_feature 1..22: note = Synthetic sequence or unknown origin
  source 1..22: mol_type = other RNA
cattccgctaggaaagacaatg

SEQ ID NO: 2678 - RNA, 22 nt, synthetic construct
  misc_feature 1..22: note = Synthetic sequence or unknown origin
  source 1..22: mol_type = other RNA
gccacagcactgttgctcttga

SEQ ID NO: 2679 - RNA, 22 nt, synthetic construct
  misc_feature 1..22: note = Synthetic sequence or unknown origin
  source 1..22: mol_type = other RNA
ttcagacaacagtggaagaaag

SEQ ID NO: 2680 - RNA, 22 nt, synthetic construct
  misc_feature 1..22: note = Synthetic sequence or unknown origin
  source 1..22: mol_type = other RNA
cacctgcagcttctccaacaca

SEQ ID NO: 2681 - RNA, 22 nt, synthetic construct
  misc_feature 1..22: note = Synthetic sequence or unknown origin
  source 1..22: mol_type = other RNA
tctcagctggtacacggcaggg

SEQ ID NO: 2682 - RNA, 22 nt, synthetic construct
  misc_feature 1..22: note = Synthetic sequence or unknown origin
  source 1..22: mol_type = other RNA
acaccttcttccccagcccagg

SEQ ID NO: 2683 - RNA, 22 nt, synthetic construct
  misc_feature 1..22: note = Synthetic sequence or unknown origin
  source 1..22: mol_type = other RNA
agttcccaaagtaccagtttgc

SEQ ID NO: 2684 - RNA, 22 nt, synthetic construct
  misc_feature 1..22: note = Synthetic sequence or unknown origin
  source 1..22: mol_type = other RNA
catgggttaccagaagaaactg

SEQ ID NO: 2685 - RNA, 22 nt, synthetic construct
  misc_feature 1..22: note = Synthetic sequence or unknown origin
  source 1..22: mol_type = other RNA
gtgtcacaaagtaaggattctg

SEQ ID NO: 2686 - RNA, 22 nt, synthetic construct
  misc_feature 1..22: note = Synthetic sequence or unknown origin
  source 1..22: mol_type = other RNA
tggcctggagcaacaaatctga

SEQ ID NO: 2687 - RNA, 22 nt, synthetic construct
  misc_feature 1..22: note = Synthetic sequence or unknown origin
  source 1..22: mol_type = other RNA
gctggcgggcattcctgaagct

SEQ ID NO: 2688 - RNA, 22 nt, synthetic construct
  misc_feature 1..22: note = Synthetic sequence or unknown origin
  source 1..22: mol_type = other RNA
cagtaccacagcaggctgggcc

SEQ ID NO: 2689 - RNA, 22 nt, synthetic construct
  misc_feature 1..22: note = Synthetic sequence or unknown origin
  source 1..22: mol_type = other RNA
tgctgtggtactggccagcagc

SEQ ID NO: 2690 - RNA, 22 nt, synthetic construct
  misc_feature 1..22: note = Synthetic sequence or unknown origin
  source 1..22: mol_type = other RNA
actgagggccatggacacggga

SEQ ID NO: 2691 - RNA, 22 nt, synthetic construct
  misc_feature 1..22: note = Synthetic sequence or unknown origin
  source 1..22: mol_type = other RNA
taccgttacctccctagaacca

SEQ ID NO: 2692 - RNA, 22 nt, synthetic construct
  misc_feature 1..22: note = Synthetic sequence or unknown origin
  source 1..22: mol_type = other RNA
cccttgattctaggcagagaca

SEQ ID NO: 2693 - RNA, 22 nt, synthetic construct
  misc_feature 1..22: note = Synthetic sequence or unknown origin
  source 1..22: mol_type = other RNA
ggctactttcagtggcagaaga

SEQ ID NO: 2694 - RNA, 22 nt, synthetic construct
  misc_feature 1..22: note = Synthetic sequence or unknown origin
  source 1..22: mol_type = other RNA
gtgtcacaaagtaaggattctg

SEQ ID NO: 2695 - RNA, 22 nt, synthetic construct
  misc_feature 1..22: note = Synthetic sequence or unknown origin
  source 1..22: mol_type = other RNA
gatatccagaaccctgaccctg

SEQ ID NO: 2696 - RNA, 22 nt, synthetic construct
  misc_feature 1..22: note = Synthetic sequence or unknown origin
  source 1..22: mol_type = other RNA
gactcagactcagtggaaacag

SEQ ID NO: 2697 - RNA, 22 nt, synthetic construct
  misc_feature 1..22: note = Synthetic sequence or unknown origin
  source 1..22: mol_type = other RNA
ctgtgtagatgacatggactgc

SEQ ID NO: 2698 - RNA, 22 nt, synthetic construct
  misc_feature 1..22: note = Synthetic sequence or unknown origin
  source 1..22: mol_type = other RNA
ctctcgccactggaaatccagc

SEQ ID NO: 2699 - RNA, 22 nt, synthetic construct
  misc_feature 1..22: note = Synthetic sequence or unknown origin
  source 1..22: mol_type = other RNA
cattccgctaggaaagacaatg

SEQ ID NO: 2700 - RNA, 22 nt, synthetic construct
  misc_feature 1..22: note = Synthetic sequence or unknown origin
  source 1..22: mol_type = other RNA
atccacttgtgcacagtgttct

SEQ ID NO: 2701 - RNA, 22 nt, synthetic construct
  misc_feature 1..22: note = Synthetic sequence or unknown origin
  source 1..22: mol_type = other RNA
caggggactatgactccatgaa

SEQ ID NO: 2702 - RNA, 22 nt, synthetic construct
  misc_feature 1..22: note = Synthetic sequence or unknown origin
  source 1..22: mol_type = other RNA
tcagactccccagacaggccct

SEQ ID NO: 2703 - RNA, 22 nt, synthetic construct
  misc_feature 1..22: note = Synthetic sequence or unknown origin
  source 1..22: mol_type = other RNA
tgacttccacatgagcgtggtc

SEQ ID NO: 2704 - RNA, 22 nt, synthetic construct
  misc_feature 1..22: note = Synthetic sequence or unknown origin
  source 1..22: mol_type = other RNA
acctgtcagtgattgggttccg

SEQ ID NO: 2705 - RNA, 22 nt, synthetic construct
  misc_feature 1..22: note = Synthetic sequence or unknown origin
  source 1..22: mol_type = other RNA
tcctcttgtcccacagatatcc

SEQ ID NO: 2706 - RNA, 22 nt, synthetic construct
  misc_feature 1..22: note = Synthetic sequence or unknown origin
  source 1..22: mol_type = other RNA
ggaagaaagctagggcctcggt

SEQ ID NO: 2707 - RNA, 22 nt, synthetic construct
  misc_feature 1..22: note = Synthetic sequence or unknown origin
  source 1..22: mol_type = other RNA
ccatgaaggaaccctgtttccg

SEQ ID NO: 2708 - RNA, 22 nt, synthetic construct
  misc_feature 1..22: note = Synthetic sequence or unknown origin
  source 1..22: mol_type = other RNA
caccaaaggctctttgttcctt

SEQ ID NO: 2709 - RNA, 22 nt, synthetic construct
  misc_feature 1..22: note = Synthetic sequence or unknown origin
  source 1..22: mol_type = other RNA
taccagtttgccacggcatcaa

SEQ ID NO: 2710 - RNA, 22 nt, synthetic construct
  misc_feature 1..22: note = Synthetic sequence or unknown origin
  source 1..22: mol_type = other RNA
agaaagctagggcctcggtgat

SEQ ID NO: 2711 - RNA, 22 nt, synthetic construct
  misc_feature 1..22: note = Synthetic sequence or unknown origin
  source 1..22: mol_type = other RNA
ggtatattgggcgggagtgtca

SEQ ID NO: 2712 - RNA, 22 nt, synthetic construct
  misc_feature 1..22: note = Synthetic sequence or unknown origin
  source 1..22: mol_type = other RNA
taccagtttgccacggcatcaa

SEQ ID NO: 2713 - RNA, 22 nt, synthetic construct
  misc_feature 1..22: note = Synthetic sequence or unknown origin
  source 1..22: mol_type = other RNA
tggcaagagacccacacaccgg

SEQ ID NO: 2714 - RNA, 22 nt, synthetic construct
  misc_feature 1..22: note = Synthetic sequence or unknown origin
  source 1..22: mol_type = other RNA
gatatccagaaccctgaccctg

SEQ ID NO: 2715 - RNA, 22 nt, synthetic construct
  misc_feature 1..22: note = Synthetic sequence or unknown origin
  source 1..22: mol_type = other RNA
ggatggcaagagacccacacac

SEQ ID NO: 2716 - RNA, 22 nt, synthetic construct
  misc_feature 1..22: note = Synthetic sequence or unknown origin
  source 1..22: mol_type = other RNA
gggttcagacaacagtggaaga

SEQ ID NO: 2717 - RNA, 22 nt, synthetic construct
  misc_feature 1..22: note = Synthetic sequence or unknown origin
  source 1..22: mol_type = other RNA
cggcatcaactgcccagaaggg

SEQ ID NO: 2718 - RNA, 22 nt, synthetic construct
  misc_feature 1..22: note = Synthetic sequence or unknown origin
  source 1..22: mol_type = other RNA
gcagcttctccaacacatcgga

SEQ ID NO: 2719 - RNA, 22 nt, synthetic construct
  misc_feature 1..22: note = Synthetic sequence or unknown origin
  source 1..22: mol_type = other RNA
cctgctcgtggtgaccgaaggg

SEQ ID NO: 2720 - RNA, 22 nt, synthetic construct
  misc_feature 1..22: note = Synthetic sequence or unknown origin
  source 1..22: mol_type = other RNA
tcaagctggtcgagaaaagctt

SEQ ID NO: 2721 - RNA, 22 nt, synthetic construct
  misc_feature 1..22: note = Synthetic sequence or unknown origin
  source 1..22: mol_type = other RNA
atccagaaccctgaccctgccg

SEQ ID NO: 2722 - RNA, 22 nt, synthetic construct
  misc_feature 1..22: note = Synthetic sequence or unknown origin
  source 1..22: mol_type = other RNA
tcggccactgacaggtgcagcc

SEQ ID NO: 2723 - RNA, 22 nt, synthetic construct
  misc_feature 1..22: note = Synthetic sequence or unknown origin
  source 1..22: mol_type = other RNA
ccaggatgaccaatccattgcc

SEQ ID NO: 2724 - RNA, 22 nt, synthetic construct
  misc_feature 1..22: note = Synthetic sequence or unknown origin
  source 1..22: mol_type = other RNA
cctgctcgtggtgaccgaaggg

SEQ ID NO: 2725 - RNA, 22 nt, synthetic construct
  misc_feature 1..22: note = Synthetic sequence or unknown origin
  source 1..22: mol_type = other RNA
ccactttcaggaggaggattcg

SEQ ID NO: 2726 - RNA, 22 nt, synthetic construct
  misc_feature 1..22: note = Synthetic sequence or unknown origin
  source 1..22: mol_type = other RNA
gtcccacagatatccagaaccc

SEQ ID NO: 2727 - RNA, 22 nt, synthetic construct
  misc_feature 1..22: note = Synthetic sequence or unknown origin
  source 1..22: mol_type = other RNA
aacacgaggatggcaagagacc

SEQ ID NO: 2728 - RNA, 22 nt, synthetic construct
  misc_feature 1..22: note = Synthetic sequence or unknown origin
  source 1..22: mol_type = other RNA
ccaaccatgatgtgctgaaact

SEQ ID NO: 2729 - RNA, 22 nt, synthetic construct
  misc_feature 1..22: note = Synthetic sequence or unknown origin
  source 1..22: mol_type = other RNA
gccaggactgccgcttccgtgt

SEQ ID NO: 2730 - RNA, 22 nt, synthetic construct
  misc_feature 1..22: note = Synthetic sequence or unknown origin
  source 1..22: mol_type = other RNA
gaagtccatagacctcatgtct

SEQ ID NO: 2731 - RNA, 22 nt, synthetic construct
  misc_feature 1..22: note = Synthetic sequence or unknown origin
  source 1..22: mol_type = other RNA
caagctggtcgagaaaagcttt

SEQ ID NO: 2732 - RNA, 22 nt, synthetic construct
  misc_feature 1..22: note = Synthetic sequence or unknown origin
  source 1..22: mol_type = other RNA
ggtatattgggcgggagtgtca

SEQ ID NO: 2733 - RNA, 22 nt, synthetic construct
  misc_feature 1..22: note = Synthetic sequence or unknown origin
  source 1..22: mol_type = other RNA
accgtccaaaacagaacaccaa

SEQ ID NO: 2734 - RNA, 22 nt, synthetic construct
  misc_feature 1..22: note = Synthetic sequence or unknown origin
  source 1..22: mol_type = other RNA
tacaaaccattctgggcttcaa

SEQ ID NO: 2735 - RNA, 22 nt, synthetic construct
  misc_feature 1..22: note = Synthetic sequence or unknown origin
  source 1..22: mol_type = other RNA
aacacatcggagagcttcgtgc

SEQ ID NO: 2736 - RNA, 22 nt, synthetic construct
  misc_feature 1..22: note = Synthetic sequence or unknown origin
  source 1..22: mol_type = other RNA
gaccctgccgtgtaccagctga

SEQ ID NO: 2737 - RNA, 22 nt, synthetic construct
  misc_feature 1..22: note = Synthetic sequence or unknown origin
  source 1..22: mol_type = other RNA
ccttctgggcagttgatgccgt

SEQ ID NO: 2738 - RNA, 22 nt, synthetic construct
  misc_feature 1..22: note = Synthetic sequence or unknown origin
  source 1..22: mol_type = other RNA
accaaaaaaatccaaaacacac

SEQ ID NO: 2739 - RNA, 22 nt, synthetic construct
  misc_feature 1..22: note = Synthetic sequence or unknown origin
  source 1..22: mol_type = other RNA
ttgaccacttcaatgtaatgat

SEQ ID NO: 2740 - RNA, 22 nt, synthetic construct
  misc_feature 1..22: note = Synthetic sequence or unknown origin
  source 1..22: mol_type = other RNA
aaacagggttccttcatggagt

SEQ ID NO: 2741 - RNA, 22 nt, synthetic construct
  misc_feature 1..22: note = Synthetic sequence or unknown origin
  source 1..22: mol_type = other RNA
agtccatagacctcatgtctag

SEQ ID NO: 2742 - RNA, 22 nt, synthetic construct
  misc_feature 1..22: note = Synthetic sequence or unknown origin
  source 1..22: mol_type = other RNA
cacgaggatggcaagagaccca

SEQ ID NO: 2743 - RNA, 22 nt, synthetic construct
  misc_feature 1..22: note = Synthetic sequence or unknown origin
  source 1..22: mol_type = other RNA
atccagaaccctgaccctgccg

SEQ ID NO: 2744 - RNA, 22 nt, synthetic construct
  misc_feature 1..22: note = Synthetic sequence or unknown origin
  source 1..22: mol_type = other RNA
gccttgcataggaagttcccaa

SEQ ID NO: 2745 - RNA, 22 nt, synthetic construct
  misc_feature 1..22: note = Synthetic sequence or unknown origin
  source 1..22: mol_type = other RNA
ttcttcgcctgttggctgcctt

SEQ ID NO: 2746 - RNA, 22 nt, synthetic construct
  misc_feature 1..22: note = Synthetic sequence or unknown origin
  source 1..22: mol_type = other RNA
tcggagagcttcgtgctaaact

SEQ ID NO: 2747 - RNA, 22 nt, synthetic construct
  misc_feature 1..22: note = Synthetic sequence or unknown origin
  source 1..22: mol_type = other RNA
gtctggttgctggggctcatgc

SEQ ID NO: 2748 - RNA, 22 nt, synthetic construct
  misc_feature 1..22: note = Synthetic sequence or unknown origin
  source 1..22: mol_type = other RNA
ctggatttagagtctctcagct

SEQ ID NO: 2749 - RNA, 22 nt, synthetic construct
  misc_feature 1..22: note = Synthetic sequence or unknown origin
  source 1..22: mol_type = other RNA
atccagaaccctgaccctgccg

SEQ ID NO: 2750 - RNA, 22 nt, synthetic construct
  misc_feature 1..22: note = Synthetic sequence or unknown origin
  source 1..22: mol_type = other RNA
ctgatcccaatgtagtaaggca

SEQ ID NO: 2751 - RNA, 22 nt, synthetic construct
  misc_feature 1..22: note = Synthetic sequence or unknown origin
  source 1..22: mol_type = other RNA
tcaggggactatgactccatga

SEQ ID NO: 2752 - RNA, 22 nt, synthetic construct
  misc_feature 1..22: note = Synthetic sequence or unknown origin
  source 1..22: mol_type = other RNA
cctgctcgtggtgaccgaaggg

SEQ ID NO: 2753 - RNA, 22 nt, synthetic construct
  misc_feature 1..22: note = Synthetic sequence or unknown origin
  source 1..22: mol_type = other RNA
attctgatgtgtatatcacaga

SEQ ID NO: 2754 - RNA, 22 nt, synthetic construct
  misc_feature 1..22: note = Synthetic sequence or unknown origin
  source 1..22: mol_type = other RNA
catgaggtctatggacttcaag

SEQ ID NO: 2755 - RNA, 22 nt, synthetic construct
  misc_feature 1..22: note = Synthetic sequence or unknown origin
  source 1..22: mol_type = other RNA
ccttctgggcagttgatgccgt

SEQ ID NO: 2756 - RNA, 22 nt, synthetic construct
  misc_feature 1..22: note = Synthetic sequence or unknown origin
  source 1..22: mol_type = other RNA
accaaaaaaatccaaaacacac

SEQ ID NO: 2757 - RNA, 22 nt, synthetic construct
  misc_feature 1..22: note = Synthetic sequence or unknown origin
  source 1..22: mol_type = other RNA
ttgaccacttcaatgtaatgat

SEQ ID NO: 2758 - RNA, 22 nt, synthetic construct
  misc_feature 1..22: note = Synthetic sequence or unknown origin
  source 1..22: mol_type = other RNA
tcctgtgatgtcaagctggtcg

SEQ ID NO: 2759 - RNA, 22 nt, synthetic construct
  misc_feature 1..22: note = Synthetic sequence or unknown origin
  source 1..22: mol_type = other RNA
aacacatcggagagcttcgtgc

SEQ ID NO: 2760 - RNA, 22 nt, synthetic construct
  misc_feature 1..22: note = Synthetic sequence or unknown origin
  source 1..22: mol_type = other RNA
gaccctgccgtgtaccagctga

SEQ ID NO: 2761 - RNA, 22 nt, synthetic construct
  misc_feature 1..22: note = Synthetic sequence or unknown origin
  source 1..22: mol_type = other RNA
tcctcttgtcccacagatatcc

SEQ ID NO: 2762 - RNA, 22 nt, synthetic construct
  misc_feature 1..22: note = Synthetic sequence or unknown origin
  source 1..22: mol_type = other RNA
agccgcagcgtcatgagcagat

SEQ ID NO: 2763 - RNA, 22 nt, synthetic construct
  misc_feature 1..22: note = Synthetic sequence or unknown origin
  source 1..22: mol_type = other RNA
cctgctcgtggtgaccgaaggg

SEQ ID NO: 2764 - RNA, 22 nt, synthetic construct
  misc_feature 1..22: note = Synthetic sequence or unknown origin
  source 1..22: mol_type = other RNA
catgagcgtggtcagggcccgg

SEQ ID NO: 2765 - RNA, 22 nt, synthetic construct
  misc_feature 1..22: note = Synthetic sequence or unknown origin
  source 1..22: mol_type = other RNA
cctcctcctgaaagtggccggg

SEQ ID NO: 2766 - RNA, 22 nt, synthetic construct
  misc_feature 1..22: note = Synthetic sequence or unknown origin
  source 1..22: mol_type = other RNA
catgaggtctatggacttcaag

SEQ ID NO: 2767 - RNA, 22 nt, synthetic construct
  misc_feature 1..22: note = Synthetic sequence or unknown origin
  source 1..22: mol_type = other RNA
tcagactccccagacaggccct

SEQ ID NO: 2768 - RNA, 22 nt, synthetic construct
  misc_feature 1..22: note = Synthetic sequence or unknown origin
  source 1..22: mol_type = other RNA
gacaagctggccgccttccccg

SEQ ID NO: 2769 - RNA, 22 nt, synthetic construct
  misc_feature 1..22: note = Synthetic sequence or unknown origin
  source 1..22: mol_type = other RNA
atccagaaccctgaccctgccg

SEQ ID NO: 2770 - RNA, 22 nt, synthetic construct
  misc_feature 1..22: note = Synthetic sequence or unknown origin
  source 1..22: mol_type = other RNA
agccgcagcgtcatgagcagat

SEQ ID NO: 2771 - RNA, 22 nt, synthetic construct
  misc_feature 1..22: note = Synthetic sequence or unknown origin
  source 1..22: mol_type = other RNA
ggagtcgatgctgatcccaatg

SEQ ID NO: 2772 - RNA, 22 nt, synthetic construct
  misc_feature 1..22: note = Synthetic sequence or unknown origin
  source 1..22: mol_type = other RNA
acatgagcgtggtcagggcccg

SEQ ID NO: 2773 - RNA, 22 nt, synthetic construct
  misc_feature 1..22: note = Synthetic sequence or unknown origin
  source 1..22: mol_type = other RNA
tgtgtatatcacagacaaaact

SEQ ID NO: 2774 - RNA, 22 nt, synthetic construct
  misc_feature 1..22: note = Synthetic sequence or unknown origin
  source 1..22: mol_type = other RNA
tgacaagtctgtctgcctattc

SEQ ID NO: 2775 - RNA, 22 nt, synthetic construct
  misc_feature 1..22: note = Synthetic sequence or unknown origin
  source 1..22: mol_type = other RNA
taaacccggccactttcaggag

SEQ ID NO: 2776 - RNA, 22 nt, synthetic construct
  misc_feature 1..22: note = Synthetic sequence or unknown origin
  source 1..22: mol_type = other RNA
gaaagcatagaggatggggttc

SEQ ID NO: 2777 - RNA, 22 nt, synthetic construct
  misc_feature 1..22: note = Synthetic sequence or unknown origin
  source 1..22: mol_type = other RNA
ggcttcaagcaacttgtagtgg

SEQ ID NO: 2778 - RNA, 22 nt, synthetic construct
  misc_feature 1..22: note = Synthetic sequence or unknown origin
  source 1..22: mol_type = other RNA
atggggttcagacaacagtgga

SEQ ID NO: 2779 - RNA, 22 nt, synthetic construct
  misc_feature 1..22: note = Synthetic sequence or unknown origin
  source 1..22: mol_type = other RNA
tccctggcccccaaggcgcaga

SEQ ID NO: 2780 - RNA, 22 nt, synthetic construct
  misc_feature 1..22: note = Synthetic sequence or unknown origin
  source 1..22: mol_type = other RNA
ccctgctcgtggtgaccgaagg

SEQ ID NO: 2781 - RNA, 22 nt, synthetic construct
  misc_feature 1..22: note = Synthetic sequence or unknown origin
  source 1..22: mol_type = other RNA
gcatgagccccagcaaccagac

SEQ ID NO: 2782 - DNA, 22 bp, synthetic construct
  misc_feature 1..22: note = Synthetic sequence or unknown origin
  source 1..22: mol_type = other DNA
ggaagagcagagccttggtctc

SEQ ID NO: 2783 - RNA, 22 nt, synthetic construct
  source 1..22: mol_type = other RNA
cagcacgggtaagccgagccgc

SEQ ID NO: 2784 - RNA, 22 nt, synthetic construct
  source 1..22: mol_type = other RNA
taccattacctccctagaacca

SEQ ID NO: 2785 - RNA, 22 nt, synthetic construct
  source 1..22: mol_type = other RNA
ctgccttgcataggaagttccc

SEQ ID NO: 2786 - RNA, 22 nt, synthetic construct
  source 1..22: mol_type = other RNA
ggaaaaggcctgcctcccccct

SEQ ID NO: 2787 - RNA, 22 nt, synthetic construct
  source 1..22: mol_type = other RNA
tgagggcacgaggaggggctgc

SEQ ID NO: 2788 - RNA, 22 nt, synthetic construct
  source 1..22: mol_type = other RNA
gccctgtgaaagtcccgggcca

SEQ ID NO: 2789 - RNA, 22 nt, synthetic construct
  source 1..22: mol_type = other RNA
ctgtccctgtggcctctggggc

SEQ ID NO: 2790 - RNA, 22 nt, synthetic construct
  source 1..22: mol_type = other RNA
aaggagtcgatgctgatcccaa

SEQ ID NO: 2791 - RNA, 22 nt, synthetic construct
  source 1..22: mol_type = other RNA
actggtaccgcatgagccccag

SEQ ID NO: 2792 - RNA, 22 nt, synthetic construct
  source 1..22: mol_type = other RNA
cctcggtgatggaaatccactt

SEQ ID NO: 2793 - RNA, 22 nt, synthetic construct
  source 1..22: mol_type = other RNA
cagggctggggagaaggtgggg

SEQ ID NO: 2794 - RNA, 22 nt, synthetic construct
  source 1..22: mol_type = other RNA
acgaaggcccttcggtgcttgg

SEQ ID NO: 2795 - RNA, 22 nt, synthetic construct
  source 1..22: mol_type = other RNA
tggtaacccatgaccaggatga

SEQ ID NO: 2796 - RNA, 22 nt, synthetic construct
  source 1..22: mol_type = other RNA
tgggcgggagtgtcagaaaatg

SEQ ID NO: 2797 - RNA, 22 nt, synthetic construct
  source 1..22: mol_type = other RNA
tccgtgtcacacaactgcccaa

SEQ ID NO: 2798 - RNA, 22 nt, synthetic construct
  source 1..22: mol_type = other RNA
atcctggtcatgggttaccaga

SEQ ID NO: 2799 - RNA, 22 nt, synthetic construct
  source 1..22: mol_type = other RNA
gctgtgacagccatggagctcc

SEQ ID NO: 2800 - RNA, 22 nt, synthetic construct
  source 1..22: mol_type = other RNA
ccgtggccttagctgtgctcgc

SEQ ID NO: 2801 - RNA, 22 nt, synthetic construct
  source 1..22: mol_type = other RNA
aggtagccaccttctaggggcc

SEQ ID NO: 2802 - RNA, 22 nt, synthetic construct
  source 1..22: mol_type = other RNA
tcaaaatcggtgaataggcaga

SEQ ID NO: 2803 - RNA, 22 nt, synthetic construct
  source 1..22: mol_type = other RNA
tacaccgaggaaatgggctcag

SEQ ID NO: 2804 - RNA, 22 nt, synthetic construct
  source 1..22: mol_type = other RNA
caccacggcacaagtgacccag

SEQ ID NO: 2805 - RNA, 22 nt, synthetic construct
  source 1..22: mol_type = other RNA
gatggatgaaacccagacacat

SEQ ID NO: 2806 - RNA, 22 nt, synthetic construct
  source 1..22: mol_type = other RNA
tgctgcctggctgggattccta

SEQ ID NO: 2807 - RNA, 22 nt, synthetic construct
  source 1..22: mol_type = other RNA
actgcccagaagggaagcgtga
